(19) United States
(12) Patent Application Publication
(10) Pub. No.: US 2010/0298410 A1
(43) Pub. Date: Nov. 25, 2010

(54) MICROMIRs

(75) Inventors: Susana Obad, Malmo (SE); Sakari Kauppinen, Smorum (DK); Joacim Elmén, Malmo (SE); Morten Lindow, Copenhagen SV (DE); Markus Heidenblad, Lund (SE)

Correspondence Address: STERNE, KESSLER, GOLDSTEIN & FOX P.L.L.C., 1100 NEW YORK AVENUE, N.W., WASHINGTON, DC, 20005, US

(73) Assignee: Santaris Pharma A/S

(21) Appl. No.: 12/681,587

(22) PCT Filed: Oct. 3, 2008
(86) PCT No.: PCT/DK08/00344

§ 371 Date: Aug. 11, 2010

Related U.S. Application Data
(60) Provisional application No. 60/977,497, filed on Oct. 4, 2007.
(60) Provisional application No. 60/979,217, filed on Oct. 11, 2007.
(60) Provisional application No. 61/028,062, filed on Feb. 12, 2008.

(30) Foreign Application Priority Data
Jul. 17, 2008 (EP) 08104780.5

(51) Int. Cl. A61K 31/7088; C12N 5/02; C07H 21/04

(52) U.S. Cl. 514/44 A; 435/375; 536/24.5

(57) ABSTRACT

The present invention relates to very short heavily modified oligonucleotides which target and inhibit microRNAs in vivo, and their use in medicaments and pharmaceutical compositions.

### RELATED APPLICATIONS

[0001] This application claims priority from four applications: U.S. 60/977,497 filed 4 Oct. 2007, U.S. 60/979,217 filed 11 Oct. 2007, U.S. 61/028,062, filed 12 Feb. 2008, and EP08104780, filed 17 Jul. 2008, all of which are hereby incorporated by reference. Furthermore we reference and incorporate by reference WO2007/112754 and WO2007/112753 which are earlier applications from the same applicants.

### FIELD OF THE INVENTION

[0002] The present invention relates to very short oligonucleotides which target and inhibit microRNAs in vivo, and their use in medicaments and pharmaceutical compositions.

### BACKGROUND OF THE INVENTION

[0003] MicroRNAs (miRNAs) are an abundant class of short endogenous RNAs that act as post-transcriptional regulators of gene expression by base-pairing with their target mRNAs. They are processed from longer (ca 70-80 nt) hairpin-like precursors termed pre-miRNAs by the RNAse III enzyme Dicer. MicroRNAs assemble in ribonucleoprotein complexes termed miRNPs and recognize their target sites by antisense complementarity thereby mediating down-regulation of their target genes. Near-perfect or perfect complementarity between the miRNA and its target site results in target mRNA cleavage, whereas limited complementarity between the microRNA and the target site results in translational inhibition of the target gene.

[0004] A summary of the role of microRNAs in human diseases, and the inhibition of microRNAs using single stranded oligonucleotides is provided by WO2007/112754 and WO2007/112753, which are both hereby incorporated by reference in its entirety. WO2008046911, hereby incorporated by reference, provides microRNA sequences which are associated with cancer. Numerous microRNAs have been associated with disease phenotypes and it is therefore desirable to provide substances capable of modulating the availability of microRNAs in vivo. WO2007/112754 and WO2007/112753 disclose short single stranded oligonucleotides which are considered to form a strong duplex with their target miRNA. SEQ ID NOs 1-45 are examples of anti microRNA oligonucleotides as disclosed in WO2007/112754 and WO2007/112753.

### SUMMARY OF THE INVENTION

[0005] The present invention is based upon the discovery that the use of very short oligonucleotides which target microRNAs and which have a high proportion of nucleotide analogue nucleotides, such as LNA nucleotides, are highly effective in alleviating the repression of RNAs, such as an mRNA, by the targeted microRNAs in vivo.

[0006] The present invention provides an oligomer a contiguous sequence of 7, 8, 9 or 10 nucleotide units in length, for use in reducing the effective amount of a microRNA target in a cell or an organism, wherein at least 70%, such as at least 80% of the nucleotide units of the oligomer are selected from the group consisting of LNA units and 2′ substituted nucleotide analogues.

[0007] The present invention provides an oligomer a contiguous sequence of 7, 8, 9 or 10 nucleotide units in length, for use in reducing the effective amount of a microRNA target in a cell or an organism, wherein at least 70% of the nucleotide units of the oligomer are selected from the group consisting of LNA units and 2′ substituted nucleotide analogues, and wherein at least 50%, such as at least 60%, such as at least 70% of the nucleotide units of the oligomer are LNA units.

[0008] The invention provides oligomers of between 7-10 nucleotides in length which comprises a contiguous nucleotide sequence of a total of between 7-10 nucleotides, such as 7, 8, 9, nucleotide units, wherein at least 50% of the nucleotide units of the oligomer are nucleotide analogues.

[0009] The invention further provides for an oligomer of between 7-10 nucleotides in length which comprises a contiguous nucleotide sequence of a total of between 7-10 nucleotides, such as 7, 8, 9, or 10, nucleotide units, wherein the nucleotide sequence is complementary to a corresponding nucleotide sequence found in mammalian or viral microRNA, and wherein at least 50% of the nucleotide units of the oligomer are nucleotide analogues.

[0010] The present invention provides olgiomers according to the invention as a medicament.

[0011] The present invention provides pharmaceutical compositions comprising the oligomer of the invention and a pharmaceutically acceptable diluent, carrier, salt or adjuvant.

[0012] The invention provides for a conjugate comprising an oligomer according to the invention, conjugated to at least one non-nucleotide or polynucleotide entity, such as a sterol, such as cholesterol.

[0013] The invention provides for the use of an oligomer or a conjugate according to the invention, for the manufacture of a medicament for the treatment of a disease or medical disorder associated with the presence or over-expression of a microRNA, such as one or more of the microRNAs referred to herein.

[0014] The invention provides for the treatment of a disease or medical disorder associated with the presence or overexpression of the microRNA, comprising the step of administering a composition (such as the pharmaceutical composition) comprising an oligomer or conjugate according to the invention to a patient suffering from or likely to suffer from said disease or medical disorder.

[0015] The invention provides for a method for reducing the effective amount of a microRNA target in a cell or an organism, comprising administering the oligomer of the invention, or a composition (such as a pharmaceutical composition) comprising the oligomer or conjugate according to the invention to the cell or organism.

[0016] The invention provides for a method for reducing the effective amount of a microRNA target in a cell or an organism, comprising administering the oligomer or conjugate or pharmaceutical composition according to the invention to the cell or organism.

[0017] The invention provides for a method for de-repression of a target mRNA (or one ore mor RNAs) in a cell or an organism, comprising administering an oligomer or conjugate according to the invention, or a composition comprising said oligomer or conjugate, to said cell or organism.

[0018] The invention provides for the use of an oligomer or a conjugate according to the invention, for inhibiting the mircoRNA in a cell which comprises said microRNA, such as a human cell. The use may be in vivo or in vitro.

### BRIEF DESCRIPTION OF THE DRAWINGS

[0019] FIG. 1. Schematic presentation of the miR-21, miR-155 and miR-122 8-mer LNA-antimiRs, indicating the targeting positions with the fully LNA-modified and phosphorothiolated LNA-antimiR. Preferred hybridisation positions for 7mer, 8mer, 9mer and 10mer LNA oligonucleotides on the mature microRNA are also indicated.

[0020] FIG. 2. Assessment of miR-21 antagonism by SEQ ID #3205 and SEQ ID #3204 LNA-antimiRs in MCF-7 cells using a luciferase sensor assay. MCF-7 cells were co-transfected with luciferase sensor plasmids containing a perfect match target site for miR-21 or a mismatch target site (.mm2) and LNA-antimiRs at different concentrations. After 24 hours, cells were harvested and luciferase activity measured. Shown are the mean of renilla/firefly ratios for three separate experiments (bars=s.e.m), were all have been normalized against 0 nM psiCHECK2 (=control).

[0021] FIG. 3. Assessment of miR-21 antagonism by SEQ ID #3205 and SEQ ID #3204 LNA-antimiRs in HeLa cells using a luciferase sensor assay. HeLa cells were co-transfected with luciferase sensor plasmids containing a perfect match target site for miR-21 (mir-21) or a mismatch target site (mm2) and LNA-antimiRs at different concentrations. After 24 hours, cells were harvested and luciferase activity measured. Shown are the mean of renilla/firefly ratios for three separate experiments (bars=s.e.m), were all have been normalized against 0 nM psiCHECK2 (=control).

[0022] FIG. 4. Assessment of miR-155 antagonism by SEQ ID #3206 and SEQ ID #3207 LNA-antimiRs in LPS-treated mouse RAW cells using a luciferase sensor assay. RAW cells were co-transfected with miR-155 and the different LNA-antimiRs at different concentrations. After 24 hours, cells were harvested and luciferase activity measured. Shown are the mean of renilla/firefly, were all have been normalized against 0 nM psiCHECK2.

[0023] FIG. 5. Assessment of miR-122 antagonism by SEQ ID #3208 and SEQ ID #4 LNA-antimiRs in HuH-7 cells using a luciferase sensor assay. HuH-7 cells were co-transfected with a miR-122 luciferase sensor containing a perfect match miR-122 target site and the different LNA-antimiRs at different concentrations. After 24 hours, cells were harvested and luciferase activity measured. Shown are the mean of renilla/firefly ratios for three separate experiments (bars=s.e.m), where all have been normalized against 0 nM psiCHECK2 (=control).

[0024] FIG. 6. Schematic presentation of the miR-21 luciferase reporter constructs.

[0025] FIG. 7. Assessment of miR-21 antagonism by an 8-mer LNA-antimiR (SEQ ID #3205) versus a 15-mer LNA-antimiR (SEQ ID #3204) in PC3 cells using a luciferase reporter assay. PC3 cells were co-transfected with luciferase reporter plasmids containing a perfect match target site for miR-21 or a mismatch target site and LNA-antimiRs at different concentrations. After 24 hours, cells were harvested and luciferase activity measured. Shown are the mean values (bars=s.e.m) of three independent experiments where the renilla/firefly ratios have been normalized against 0 nM empty vector without target site (=control). Shown is also a schematic presentation of the miR-21 sequence and the design and position of the LNA-antimiRs. LNA nucleotides are indicated by ovals, and DNA residues are indicated by bars.

[0026] FIG. 8. Specificity assessment of miR-21 antagonism by an 8-mer LNA-antimiR in HeLa cells using a luciferase reporter assay. HeLa cells were co-transfected with luciferase reporter plasmids containing a perfect match or a mismatched target site for miR-21 and LNA-antimiRs (SEQ ID #3205) or an 8-mer LNA mismatch control oligo (SEQ ID #3218) at different concentrations. After 24 hours, cells were harvested and luciferase activity was measured. Shown are the mean values (bars=s.e.m) for three independent experiments where the Renilla/firefly ratios have been normalized against 0 nM empty vector without target site (=control). Shown is also a schematic presentation of the miR-21 sequence and the design and position of the LNA-antimiRs. Mismatches are indicated by filled ovals.

[0027] FIG. 9. Assessment of the shortest possible length of a fully LNA-modified LNA-antimiR that mediates effective antagonism of miR-21. HeLa cells were co-transfected with luciferase reporter plasmids containing a perfect match or a mismatch target site for miR-21 and the LNA-antimiRs at different concentrations (SEQ ID #3209=6-mer and SEQ ID #3210=7-mer). After 24 hours, cells were harvested and luciferase activity measured. Shown are the mean values (bars=s.e.m) for three independent experiments where the renilla/firefly ratios have been normalized against 0 nM empty vector without target site (=control). Shown is also a schematic presentation of the miR-21 sequence and the design and position of the LNA-antimiRs.

[0028] FIG. 10. Length assessment of fully LNA-substituted LNA-antimiRs antagonizing miR-21. HeLa cells were co-transfected with luciferase reporter plasmids containing a perfect match or a mismatch target site for miR-21 and LNA-antimiRs at different concentrations (SEQ ID #3211=9-mer, SEQ ID #3212=10-mer, SEQ ID #3213=12-mer and SEQ ID #3214=14-mer). After 24 hours, cells were harvested and luciferase activity measured. Shown are the mean values (bars=s.e.m) for three independent experiments where the renilla/firefly ratios have been normalized against 0 nM empty vector without target site (=control). Shown is also a schematic presentation of the miR-21 sequence and the design and position of the LNA-antimiRs.

[0029] FIG. 11. Determination of the most optimal position for an 8-mer LNA-antimiR within the miR target recognition sequence. HeLa cells were co-transfected with luciferase reporter plasmids containing a perfect match or a mismatch target site for miR-21 and the LNA-antimiRs at different concentrations. After 24 hours, cells were harvested and luciferase activity measured. Shown are the mean values (bars=s.e.m) for three independent experiments where the renilla/firefly ratios have been normalized against 0 nM empty vector without target site (=control). Shown is also a schematic presentation of the miR-21 sequence and the design and position of the LNA-antimiRs.

[0030] FIG. 12. Validation of interaction of the Pdcd-4-3′-UTR and miR-21 by the 8-mer SEQ ID #3205 LNA-antimiR. HeLa cells were co-transfected with a luciferase reporter plasmid containing part of the 3′UTR of Pdcd4 gene and LNA-antimiRs at different concentrations (SEQ ID #3205=8 mer, perfect match; SEQ ID #3218=8 mer, mismatch; SEQ ID #3204=15 mer, LNA/DNA mix; SEQ ID #3220=15 mer, gapmer). After 24 hours, cells were harvested and luciferase activity measured. Shown are renilla/firefly ratios that have been normalized against 0 nM. Shown is also a schematic presentation of the miR-21 sequence and the design and position of the LNA-antimiRs.

[0031] FIG. 13. Comparison of an 8-mer LNA-antimiR (SEQ ID #3207) with a 15-mer LNA-antimiR (SEQ ID #3206) in antagonizing miR-155 in mouse RAW cells. Mouse RAW cells were co-transfected with luciferase reporter plasmids containing a perfect match for miR-155 and the different LNA-antimiRs at different concentrations. After 24 hours, cells were harvested and luciferase activity measured. Shown are the mean values (bars=s.e.m) of three independent experiments where the renilla/firefly ratios have been normalized against 0 nM empty vector without miR-155 target site (=control). Shown is also a schematic presentation of the miR-155 sequence and the design and position of the LNA-antimiRs.

[0032] FIG. 14. Assessment of c/EBP□Assessment of c/EBPer LNA-antimiR (SEQ ID #3207) with a 15-mer LNA-antimiR (SEQ ID #3206) in antagonizing miR-155 in mouse RAW cells. Mouse RAW cells were co-transfected with luciferase reporter plasmids containing a perfect match for miR-155 and the diffter 20 hours, cells were harvested and western blot analysis of protein extracts from RAW cells was performed. The different isoforms of c/EBP_{β} are indicated, and the ratios calculated on c/EBP_{β} LIP and beta-tubulin are shown below.

[0033] FIG. 15. Antagonism of miR-106b by a fully LNA-modified 8-mer (SEQ ID #3221) LNA-antimiR or by a 15-mer mixmer (SEQ ID #3228) antimiR. HeLa cells were co-transfected with luciferase reporter plasmids containing a perfect match for miR-106b and the different LNA-antimiRs at different concentrations. After 24 hours, cells were harvested and luciferase activity measured. Shown are the mean values of four replicates where the renilla/firefly ratios have been normalized against 0 nM empty vector without miRNA target site (=control). Shown is also a schematic presentation of the miR-106b sequence and the design and position of the LNA-antimiRs.

[0034] FIG. 16. Antagonism of miR-19b by a fully LNA-modified 8-mer (SEQ ID #3222) LNA-antimiR and a 15-mer (SEQ ID #3229) mixmer antimiR. HeLa cells were co-transfected with luciferase reporter plasmids containing a perfect match for miR-19a and the two LNA-antimiRs at different concentrations. After 24 hours, cells were harvested and luciferase activity measured. Shown are the mean values of four replicate experiments, where the renilla/firefly ratios have been normalized against 0 nM empty vector without a miR-19a target site (=control). Shown is also a schematic presentation of the miR-19a sequence and the design and position of the LNA-antimiRs.

[0035] FIG. 17. Schematic presentation showing the mature human miR-221 and miR-222 sequences. Shown in the square is the seed sequence (7-mer) that is conserved in both miRNA sequences.

[0036] FIG. 18. Targeting of a microRNA family using short, fully LNA-substituted LNA-antimiR. PC3 cells were co-transfected with luciferase reporter plasmids for miR-221 and miR-222 separately or together and with the different LNA-antimiRs at varying concentrations. When co-transfecting with the LNA-antimiRs (15-mers) SEQ ID #3223 (against miR-221) and SEQ ID #3224 (against miR-222), the total concentration was 2 nM (1 nM each), while transfecting the cells with SEQ ID #3225 (7-mer) the concentrations were 0, 1, 5, 10 or 25 nM. After 24 hours, cells were harvested and luciferase activity measured. Shown are the mean values (bars=s.e.m) of three independent experiments where the renilla/firefly ratios have been normalized against 0 nM empty vector without a miRNA target site (=control). Shown is also a schematic presentation of the miR-221/222 sequence and the design and position of the LNA-antimiRs.

[0037] FIG. 19. Assessment of p27 protein levels as a functional readout for antagonism of the miR-221/222 family by the 7-mer SEQ ID #3225 LNA-antimiR. PC3 cells were transfected with the 7-mer LNA-antimiR SEQ ID #3225 targeting both miR-221 and miR-222 at varying concentrations. After 24 hours, cells were harvested and protein levels were measured on a western blot. Shown are the ratios of p27/tubulin.

[0038] FIG. 20. Assessment of miR-21 antagonism by an 8-mer LNA-antimiR (SEQ ID #3205) versus a 15-mer LNA-antimiR (SEQ ID #3204) and an 8-mer with 2 mismatches (SEQ ID #3218) in HepG2 cells using a luciferase reporter assay.

[0039] HepG2 cells were co-transfected with luciferase reporter plasmid containing a perfect match target site for miR-21 and LNA-antimiRs at different concentrations. After 24 hours, cells were harvested and luciferase activity measured. Shown are the mean values (bars=s.e.m) of three independent experiments where the renilla/firefly ratios have been normalized against 0 nM empty vector without target site (=control). Shown is also a schematic presentation of the miR-21 sequence and the design and position of the LNA-antimiRs.

[0040] FIG. 21. Validation of interaction of the Pdcd4 3′UTR and miR-21 by the 8-mer SEQ ID #3205 LNA-antimiR versus the 15-mer (SEQ ID #3204) and an 8-mer with two mismatches (SEQ ID #3218).

[0041] Huh-7 cells were co-transfected with a luciferase reporter plasmid containing part of the 3′UTR of Pdcd4 gene, pre-miR-21 (10 nM) and LNA-antimiRs at different concentrations. After 24 hours, cells were harvested and luciferase activity measured. Shown are the mean values (bars=s.e.m) of three independent experiments where the renilla/firefly ratios have been normalized against 0 nM empty vector without target site (=control). Shown is also a schematic presentation of the miR-21 sequence and the design and position of the LNA-antimiRs.

[0042] FIG. 22. Antagonism of miR-21 by SEQ ID #3205 leads to increased levels of Pdcd4 protein levels.

[0043] HeLa cells were transfected with 5 nM LNA-antimiR SEQ ID #3205 (perfect match), or SEQ ID #3219 LNA scrambled (8mer) or SEQ ID #3218 (8-mer mismatch). Cells were harvested after 24 hours and subjected to Western blot with Pdcd4 antibody.

[0044] FIG. 23. ALT and AST levels in mice treated with SEQ ID #3205 (perfect match) or SEQ ID #3218 (mismatch control). Mice were sacrificed after 14 days and after receiving 25 mg/kg every other day.

[0045] FIG. 24. Assessment of PU.1 protein levels as a functional readout for miR-155 antagonism by short LNA-antimiR (SEQ ID #3207).

[0046] THP-1 cells were co-transfected with pre-miR-155 (5 nmol) and different LNA oligonucleotides (5 nM) and 100 ng/ml LPS was added. After 24 hours, cells were harvested and western blot analysis of protein extracts from the THP-1 cells was performed. PU.1 and tubulin are indicated.

[0047] FIG. 25. Assessment of p27 protein levels as a functional readout for antagonism of the miR-221/222 family by the 7-mer SEQ ID #3225 LNA-antimiR.

[0048] PC3 cells were transfected with the 7-mer LNA-antimiR SEQ ID #3225 targeting both miR-221 and miR-222 and a LNA scrambled control at 5 and 25 nM. After 24 hours, cells were harvested and protein levels were measured on a western blot. Shown are the ratios of p27/tubulin.

[0049] FIG. 26. Knock-down of miR-221/222 by the 7-mer SEQ ID #3225 (perfect match) LNA-antimiR reduces colony formation in soft agar in PC3 cells.

[0050] PC3 cells were transfected with 25 nM of the 7-mer LNA-antimiR SEQ ID #3225 targeting both miR-221 and miR-222 or a 7-mer scrambled control ((SEQ ID #3231). After 24 hours, cells were harvested and seeded on soft agar. After 12 days, colonies were counted. One experiment has been done in triplicate.

[0051] FIG. 27. Overview of the human let-7 family, and of tested antagonists.

[0052] (upper) The sequences represent the mature miRNA for each member and the box depicts nucleotides 2-16, the positions typically antagonized by LNA-antimiRs. Columns to the right show the number of nucleotide differences compared to let-7a, within the seed (S: position 2-8), extended seed (ES; position 2-9), and the remaining sequence typically targeted by LNA-antimiRs (NE; position 9-16), respectively. Nucleotides with inverted colors are altered compared to let-7a. (lower) Summary of tested antagonists against the let-7 family, including information on design, length and perfectly complementary targets. All compounds are fully phoshorothiolated.

[0053] FIG. 28. Assessment of let-7 antagonism by six different LNA-antimiRs in Huh-7 cells using a luciferase sensor assay. Huh-7 cells were co-transfected with luciferase sensor plasmids containing a partial HMGA2 3′UTR (with four let-7 binding sites), with or without let-7a precursor (grey and black bars, respectively), and with 6 different LNA-antimiRs at increasing concentrations. After 24 hours, cells were harvested and luciferase activity measured. Shown are the mean of renilla/firefly ratios for duplicate measurements and standard deviations for each assay. Within each LNA-antimiR group all ratios have been normalized to the average of wells containing no let-7a precursor (black bars).

[0054] FIG. 29. Luciferase results from Huh-7 cells transfected with the HMGA2 3′UTR sensor plasmid, LNA-antimiRs SEQ ID #3226 (left) and SEQ ID #3227 (right), and pre-miRs for let-7a (A), let-7d (B), let-7e (C), and let-71 (D). Grey bars indicate the target de-repression after pre-mis inclusion, whereas black control bars represent the equivalent level without pre-miR addition. Each ratio is based on quadruplicate measurements and have been normalized against the average of wells containing no precursor (black bars) within each treatment group.

[0055] FIG. 30. Luciferase results from HeLa cells transfected with the HMGA2 3′UTR sensor plasmid or control vector, and the LNA-antimiR SEQ ID #3227 at various concentrations. Each ratio is based on quadruplicate measurements normalized against untreated (0 nM) empty control vector (psi-CHECK-2; grey bars).

[0056] FIG. 31. Assessment of miR-21 antagonism by 8mer (#3205) in HCT116 cells using a luciferase sensor assay. HCT116 cells were co-transfected with luciferase sensor plasmids containing a perfect match target site for miR-21(grey bars) and LNA-antimiR and control oigonucleotides at different concentrations. After 24 hours, cells were harvested and luciferase activity measured. Shown is one typical example of two where the renilla/firefly ratios have been normalized against 0 nM empty vector (=black bars).

[0057] FIG. 32. Silencing of miR-21 by the 8-mer #3205 LNA-antimiR reduces colony formation in soft agar in PC3 cells. PC3 cells were transfected with 25 nM of the 8-mer LNA-antimiR #3205 targeting miR-21. After 24 hours, cells were harvested and seeded on soft agar. After 12 days, colonies were counted. Shown is the mean of three separate experiments, each performed in triplicate, and normalised against 0 nM control (i.e. transfection but with no LNA). p=0.01898 for #3205.

[0058] FIG. 33. Knock-down of miR-21 by the 8-mer #3205 LNA-antimiR reduces colony formation in soft agar in HepG2 cells. HepG2 cells were transfected with 25 nM of the 8-mer LNA-antimiR #3205 targeting miR-21. After 24 hours, cells were harvested and seeded on soft agar. After 17 days, colonies were counted. Shown is the mean of three replicates from one experiment (bars=SEM).

[0059] FIG. 34. Wound closure in the invasive human prostate cell line PC3 after treatment with #3205. (A) PC3 cells were transfected at day 3 with LNA-antimiR and control oligonucleotides at 25 nM, #3205 (8mer, perfect match) and #3219 (8mer, mismatch) and the following day a scratch was made. Pictures were taken after 24 hours in order to monitor the migration. (B) The area in each timepoint has been measured with the software program Image J and normalized against respective 0 h time-point.

[0060] FIG. 35. Length assessment of fully LNA-substituted LNA-antimiRs antagonizing miR-155. RAW cells were co-transfected with luciferase reporter plasmids containing a perfect match target site for miR-155 and with LNA-antimiR oligonucleotides at different concentrations. After 24 hours, cells were harvested and luciferase activity measured. Shown are the mean values (bars=s.e.m) for three independent experiments where the renilla/firefly ratios have been normalized against 0 nM empty vector without target site (=mock). Shown is also a schematic presentation of the miR sequence and the design and position of the LNA-antimiRs.

[0061] FIG. 36. Binding of 5′-FAM labeled LNA-antimiR-21 (#3205) to mouse plasma protein. (A) % unbound LNA-antimiR-21 compound as a function of oligonucleotide concentration in mouse plasma. (B) Concentration of unbound LNA-antimiR-21 compound #3205 as a function of #3205 concentration in mouse plasma.

[0062] FIG. 37. Quantification Ras protein levels by Western blot analysis.
[0063] A. Gel image showing Ras and Tubulin (internal standard) protein in treated (anti-let-7; 8-mer) vs. untreated (saline) lung and kidney samples. B. Quantifications of Ras protein levels in the lung and kidney, respectively, of LNA-antimiR-treated mice (black bars), normalized against equivalent saline controls (grey bars), using tubulin as equal-loading control.
[0064] B. Silencing of miR-21 by #3205 leads to increased levels of Pdcd4 protein levels in vivo.
[0065] C. Mice were injected with saline or 25 mg/kg LNA-antimiR (#3205) over 14 days every other day, with a total of 5 doses. Mice were sacrificed and protein was isolated from kidney and subjected to Western blot analysis with Pdcd4 antibody. A. Gel image showing Pdcd4 and Gapdh (internal standard) protein in treated (antimiR-21; 8-mer) vs. untreated (saline) kidney samples (M1, mouse 1; M2, mouse 2). B. Quantification of Pdcd4 protein levels in kidneys of LNA-antimiR-treated mice (dark grey bars), normalized against the average of equivalent saline controls (light grey bars), using Gapdh as loading control.

### DETAILED DESCRIPTION OF THE INVENTION

[0066] Short oligonucleotides which incorporate LNA are known from the in vitro reagents area, (see for example WO2005/098029 and WO 2006/069584). However the molecules designed for diagnostic or reagent use are very different in design than those for in vivo or pharmaceutical use. For example, the terminal nucleotides of the reagent oligos are typically not LNA, but DNA, and the internucleoside linkages are typically other than phosphorothioate, the preferred linkage for use in the oligonucleotides of the present invention. The invention therefore provides for a novel class of oligonucleotides (referred to herein as oligomers) per se.

[0067] The following embodiments refer to certain embodiments of the oligomer of the invention, which may be used in a pharmaceutical composition. Aspects which refer to the oligomer may also refer to the contiguous nucleotide sequence, and vice versa.

### The Oligomer

[0068] The oligomer of the invention is a single stranded oligonucleotide which comprises nucleotide analogues, such as LNA, which form part of, or the entire contiguous nucleotide sequence of the oligonucleotide. The nucleotide sequence of the oligomer consists of a contiguous nucleotide sequence.

[0069] The term “oligonucleotide” (or simply “oligo”), which is used interchangeably with the term “oligomer” refers, in the context of the present invention, to a molecule formed by covalent linkage of two or more nucleotides. When used in the context of the oligonucleotide of the invention (also referred to the single stranded oligonucleotide), the term “oligonucleotide” may have, in one embodiment, for example have between 7-10 nucleotides, such as in individual embodiments, 7, 8, 9, or 10.

[0070] The term ‘nucleotide’ refers to nucleotides, such as DNA and RNA, and nucleotide analogues. It should be recognised that, in some aspects, the term nucleobase may also be used to refer to a nucleotide which may be either naturally occurring or non-naturally occurring in this respect the term nucleobase and nucleotide may be used interchangeably herein.

[0071] In some embodiments, the contiguous nucleotide sequence consists of 7 nucleotide analogues. In some embodiments, the contiguous nucleotide sequence consists of 8 nucleotide analogues. In some embodiments, the contiguous nucleotide sequence consists of 9 nucleotide analogues.

[0072] In one embodiment at least about 50% of the nucleotides of the oligomer are nucleotide analogues, such as at least about 55%, such as at least about 60%, or at least about 65% or at least about 70%, such as at least about 75%, such as at least about 80%, such as at least about 85%, such as at least about 90%, such as at least about 95% or such as 100%. It will also be apparent that the oligonucleotide may comprise of a nucleotide sequence which consists of only nucleotide analogues. Suitably, the oligomer may comprise at least one LNA monomer, such as 2, 3, 4, 5, 6, 7, 8, 9 or 10 LNA monomers. As described below, the contiguous nucleotide sequence may consist only of LNA units (including linkage groups, such as phosphorothioate linkages), or may conists of LNA and DNA units, or LNA and other nucleotide analogues. In some embodiments, the contiguous nucleotide sequence comprises either one or two DNA nucleotides, the remainder of the nucleotides being nucleotide analogues, such as LNA unit.

[0073] In some embodiments, the contiguous nucleotide sequence consists of 6 nucleotide analogues and a single DNA nucleotide. In some embodiments, the contiguous nucleotide consists of 7 nucleotide analogues and a single DNA nucleotide. In some embodiments, the contiguous nucleotide sequence consists of 8 nucleotide analogues and a single DNA nucleotide. In some embodiments, the contiguous nucleotide sequence consists of 9 nucleotide analogues and a single DNA nucleotide. In some embodiments, the contiguous nucleotide sequence consists of 7 nucleotide analogues and two DNA nucleotides. In some embodiments, the contiguous nucleotide sequence consists of 8 nucleotide analogues and two DNA nucleotides.

[0074] The oligomer may consist of the contiguous nucleotide sequence.

[0075] In a specially preferred embodiment, all the nucleotide analogues are LNA. In a further preferred embodiment, all nucleotides of the oligomer are LNA. In a further preferred embodiment, all nucleotides of the oligomer are LNA and all internucleoside linkage groups are phosphothioate.

[0076] Herein, the term “nitrogenous base” is intended to cover purines and pyrimidines, such as the DNA nucleobases A, C, T and G, the RNA nucleobases A, C, U and G, as well as non-DNA/RNA nucleobases, such as 5-methylcytosine (^{Me}C), isocytosine, pseudoisocytosine, 5-bromouracil, 5-propynyluracil, 5-propyny-6-fluoroluracil, 5-methylthiazoleuracil, 6-aminopurine, 2-aminopurine, inosine, 2,6-diaminopurine, 7-propyne-7-deazaadenine, 7-propyne-7-deazaguanine and 2-chloro-6-aminopurine, in particular ^{Me}C. It will be understood that the actual selection of the non-DNA/RNA nucleobase will depend on the corresponding (or matching) nucleotide present in the microRNA strand which the oligonucleotide is intended to target. For example, in case the corresponding nucleotide is G it will normally be necessary to select a non-DNA/RNA nucleobase which is capable of establishing hydrogen bonds to G. In this specific case, where the corresponding nucleotide is G, a typical example of a preferred non-DNA/RNA nucleobase is ^{Me}C.

[0077] It should be recognised that the term in ‘one embodiment’ should not necessarily be limited to refer to one specific embodiment, but may refer to a feature which may be present in ‘some embodiments’, or even as a generic feature of the invention. Likewise, the use of the term ‘some embodiments’ may be used to describe a feature of one specific embodiment, or a collection of embodiments, or even as a generic feature of the invention.

[0078] The terms “corresponding to” and “corresponds to” refer to the comparison between the nucleotide sequence of the oligomer or contiguous nucleotide sequence (a first sequence) and the equivalent contiguous nucleotide sequence of a further sequence selected from either i) a sub-sequence of the reverse complement of the microRNA nucleic acid target (such as a microRNA target selected from SEQ ID 40-SEQ ID 976, and/or ii) the sequence of nucleotides provided herein such as the group consisting of SEQ ID NO 977-1913, or SEQ ID NO 1914-2850, or SEQ ID NO 2851-3787. Nucleotide analogues are compared directly to their equivalent or corresponding nucleotides. A first sequence which corresponds to a further sequence under i) or ii) typically is identical to that sequence over the length of the first sequence (such as the contiguous nucleotide sequence).

[0079] When referring to the length of a nucleotide molecule as referred to herein, the length corresponds to the number of monomer units, i.e. nucleotides, irrespective as to whether those monomer units are nucleotides or nucleotide analogues. With respect to nucleotides or nucleobases, the terms monomer and unit are used interchangeably herein.

[0080] It should be understood that when the term “about” is used in the context of specific values or ranges of values, the disclosure should be read as to include the specific value or range referred to.

[0081] As used herein, “hybridisation” means hydrogen bonding, which may be Watson-Crick, Hoogsteen, reversed Hoogsteen hydrogen bonding, etc., between complementary nucleoside or nucleotide bases. The four nucleobases commonly found in DNA are G, A, T and C of which G pairs with C, and A pairs with T. In RNA T is replaced with uracil (U), which then pairs with A. The chemical groups in the nucleobases that participate in standard duplex formation constitute the Watson-Crick face. Hoogsteen showed a couple of years later that the purine nucleobases (G and A) in addition to their Watson-Crick face have a Hoogsteen face that can be recognised from the outside of a duplex, and used to bind pyrimidine oligonucleotides via hydrogen bonding, thereby forming a triple helix structure.

[0082] In the context of the present invention “complementary” refers to the capacity for precise pairing between two nucleotides sequences with one another. For example, if a nucleotide at a certain position of an oligonucleotide is capable of hydrogen bonding with a nucleotide at the corresponding position of a DNA or RNA molecule, then the oligonucleotide and the DNA or RNA are considered to be complementary to each other at that position. The DNA or RNA strand are considered complementary to each other when a sufficient number of nucleotides in the oligonucleotide can form hydrogen bonds with corresponding nucleotides in the target DNA or RNA to enable the formation of a stable complex. To be stable in vitro or in vivo the sequence of an oligonucleotide need not be 100% complementary to its target microRNA. The terms “complementary” and “specifically hybridisable” thus imply that the oligonucleotide binds sufficiently strong and specific to the target molecule to provide the desired interference with the normal function of the target whilst leaving the function of non-target RNAs unaffected. However, in one preferred embodiment the term complementary shall mean 100% complementary or fully complementary.

[0083] In a preferred example the oligonucleotide of the invention is 100% complementary to a miRNA sequence, such as a human microRNA sequence, or one of the microRNA sequences referred to herein.

[0084] In a preferred example, the oligonucleotide of the invention comprises a contiguous sequence, which is 100% complementary to the seed region of the human microRNA sequence.

[0085] Preferably, the term “microRNA” or “miRNA”, in the context of the present invention, means an RNA oligonucleotide consisting of between 18 to 25 nucleotides in length. In functional terms miRNAs are typically regulatory endogenous RNA molecules.

[0086] The terms “target microRNA” or “target miRNA” refer to a microRNA with a biological role in human disease, e.g. an upregulated, oncogenic miRNA or a tumor suppressor miRNA in cancer, thereby being a target for therapeutic intervention of the disease in question.

[0087] The terms “target gene” or “target mRNA” refer to regulatory mRNA targets of microRNAs, in which said “target gene” or “target mRNA” is regulated post-transcriptionally by the microRNA based on near-perfect or perfect complementarity between the miRNA and its target site resulting in target mRNA cleavage; or limited complementarity, often conferred to complementarity between the so-called seed sequence (nucleotides 2-7 of the miRNA) and the target site resulting in translational inhibition of the target mRNA.

[0088] In the context of the present invention the oligonucleotide is single stranded, this refers to the situation where the oligonucleotide is in the absence of a complementary oligonucleotide—i.e. it is not a double stranded oligonucleotide complex, such as an siRNA. In one embodiment, the composition according of the invention does not comprise a further oligonucleotide which has a region of complementarity with the oligomer of 5 or more, such as 6, 7, 8, 9, or 10 consecutive nucleotides, such as eight or more.

### Length

[0089] Surprisingly we have found that such short ‘antimiRs’ provide an improved specific inhibition of microRNAs in vivo, whilst retaining remarkable specificity for the microRNA target. A further benefit has been found to be the ability to inhibit several microRNAs simultaneously due to the conservation of homologous short sequences between microRNA species—such as the seed regions as described herein. According to the present invention, it has been found that it is particularly advantageous to have short oligonucleotides of 7, 8, 9, 10 nucleotides, such as 7, 8 or 9 nucleotides.

### Sequences

[0090] The contiguous nucleotide sequence is complementary (such as 100% complementary—i.e. perfectly complementary) to a corresponding region of a mammalian, human or viral microRNA (miRNA) sequence, preferably a human or viral miRNA sequence.

[0091] The microRNA sequence may suitably be a mature microRNA. In some embodiments the microRNA may be a microRNA precursor.

[0092] The human microRNA sequence may be selected from SEQ ID No 1-558 as disclosed in WO2008/046911, which are all hereby and specifically incorporated by reference. As described in WO2008/046911, these microRNAs are associated with cancer.

[0093] The viral microRNA sequence may, in some embodiments, be selected from the group consisting of Herpes simplex virus 1, Kaposi sarcoma-associated herpesvirus, Epstein Barr virus and Human cytomegalovirus.

[0094] In one embodiment, the contiguous nucleotide sequence is complementary (such as 100% complementary) to a corresponding region of a miRNA sequence selected from the group of miRNAs listed in table 1. Table 1 provides 7mer, 8mer and 9mer oligomers which target human and viral microRNAs published in miRBase (Release 12.0—http://microrna.sanger.ac.uk/sequences/).

[0095] In some embodiments, the oligomers according to the invention may consist of or comprise a contiguous nucleotide sequence which is complementary to a corresponding microRNA sequence selected from the group consisting of miR-1, miR-10b, miR-17-3p, miR-18, miR-19a, miR-19b, miR-20, miR-21, miR-34a, miR-93, miR-106a, miR-106b, miR-122, miR-133, miR-134, miR-138, miR-155, miR-192, miR-194, miR-221, miR-222, miR-375.

[0096] Therefore, in one embodiment, the miRNA (i.e target miRNA) is selected from the group consisting of miR-1, miR-10b, miR-17-3p, miR-18, miR-19a, miR-19b, miR-20, miR-21, miR-34a, miR-93, miR-106a, miR-106b, miR-122, miR-133, miR-134, miR-138, miR-155, miR-192, miR-194, miR-221, miR-222, and miR-375.

[0097] In one embodiment, the miRNA target is a member of the miR 17-92 cluster, such as miR 17, miR 106a, miR 106b, miR 18, miR 19a, miR 19b/1, miR 19b/2, miR20/93, miR92/1, miR92/2 and miR25.

[0098] In some embodiments the contiguous nucleotide sequence is complementary to a corresponding region of a microRNA (miRNA) sequence selected from the group consisting of miR-21, miR-155, miR-221, mir-222, and mir-122.

[0099] In some embodiments said miRNA is selected from the group consisting of miR-1, miR-10miR-29, miR-125b, miR-126, miR-133, miR-141, miR-143, miR-200b, miR-206, miR-208, miR-302, miR-372, miR-373, miR-375, and miR-520c/e.

[0100] In some embodiments the contiguous nucleotide sequence is complementary to a corresponding region of a microRNA (miRNA) sequence present in the miR 17-92 cluster, such as a microRNA selected from the group consisting of miR-17-5p, miR-20a/b, miR-93, miR-106a/b, miR-18a/b, miR-19a/b, miR-25, miR-92a, miR-363.

[0101] In one embodiment, the miRNA (i.e target miRNA) is miR-21, such as hsa-miR-21. In one embodiment, the miRNA (i.e target miRNA) is miR-122, such as hsa-miR-122. In one embodiment, the miRNA (i.e target miRNA) is miR-19b, such as hsa-miR-19b. In one embodiment, the miRNA (i.e target miRNA) is miR-155, such as hsa-miR-155. In one embodiment, the miRNA (i.e target miRNA) is miR-375, such as hsa-miR-375. In one embodiment, the miRNA (i.e target miRNA) is miR-375, such as hsa-miR-106b.

[0102] Suitably, the contiguous nucleotide sequence may be complementary to a corresponding region of the microRNA, such as a hsa-miR selected from the group consisting of 19b, 21, 122, 155 and 375.

### The Seed Region and Seedmers

[0103] The inventors have found that carefully designed short single stranded oligonucleotides comprising or consisting of nucleotide analogues, such as high affinity nucleotide analogues such as locked nucleic acid (LNA) units, show significant silencing of microRNAs, resulting in reduced microRNA levels. It was found that tight binding of said oligonucleotides to the so-called seed sequence, typically nucleotides 2 to 8 or 2 to 7, counting from the 5′ end, of the target microRNAs was important. Nucleotide 1 of the target microRNAs is a non-pairing base and is most likely hidden in a binding pocket in the Ago 2 protein. Whilst not wishing to be bound to a specific theory, the present inventors consider that by selecting the seed region sequences, particularly with oligonucleotides that comprise LNA, preferably LNA units in the region which is complementary to the seed region, the duplex between miRNA and oligonucleotide is particularly effective in targeting miRNAs, avoiding off target effects, and possibly providing a further feature which prevents RISC directed miRNA function.

[0104] The inventors have found that microRNA silencing is even more enhanced when LNA-modified single stranded oligonucleotides do not contain a nucleotide at the 3′ end corresponding to this non-paired nucleotide 1. It was further found that at least two LNA units in the 3′ end of the oligonucleotides according to the present invention made said oligonucleotides highly nuclease resistant.

[0105] In one embodiment, the first or second 3′ nucleotide of the oligomer corresponds to the second 5′ nucleotide of the microRNA sequence, and may be a nucleotide analogue, such as LNA.

[0106] In one embodiment, nucleotide units 1 to 6 (inclusive) of the oligomer as measured from the 3′ end the region of the oligomer are complementary to the microRNA seed region sequence, and may all be nucleotide analogues, such as LNA.

[0107] In one embodiment, nucleotide units 1 to 7 (inclusive) of the oligomer as measured from the 3′ end the region of the oligomer are complementary to the microRNA seed region sequence, and may all be nucleotide analogues, such as LNA.

[0108] In one embodiment, nucleotide units 2 to 7 (inclusive) of the oligomer as measured from the 3′ end the region of the oligomer are complementary to the microRNA seed region sequence, and may all be nucleotide analogues, such as LNA.

[0109] In one embodiment, the oligomer comprises at least one nucleotide analogue unit, such as at least one LNA unit, in a position which is within the region complementary to the miRNA seed region. The oligomer may, in one embodiment comprise at between one and 6 or between 1 and 7 nucleotide analogue units, such as between 1 and 6 and 1 and 7 LNA units, in a position which is within the region complementary to the miRNA seed region.

[0110] In one embodiment, the contiguous nucleotide sequence consists of or comprises a sequence which is complementary (such as 100% complementary) to the seed sequence of said microRNA.

[0111] In one embodiment, the contiguous nucleotide sequence consists of or comprises a sequence selected from any one of the seedmer sequences listed in table 1.

[0112] In one embodiment, the 3′ nucleotide of the seedmer forms the 3′ most nucleotide of the contiguous nucleotide sequence, wherein the contiguous nucleotide sequence may, optionally, comprise one or two further nucleotide 5′ to the seedmer sequence.

[0113] In one embodiment, the oligomer does not comprise a nucleotide which corresponds to the first nucleotide present in the microRNA sequence counted from the 5′ end.

[0114] In one embodiment, the oligonucleotide according to the invention does not comprise a nucleotide at the 3′ end that corresponds to the first 5′ end nucleotide of the target microRNA.

### Nucleotide Analogues

[0115] According to the present invention, it has been found that it is particularly advantageous to have short oligonucleotides of 7, 8, 9, 10 nucleotides, such as 7, 8 or 9 nucleotides, wherein at least 50%, such as 55%, 60%, 65%, 70%, 75%, 80%, 85%, 90%, 95% A or such as 100% of the nucleotide units of the oligomer are (preferably high affinity) nucleotide analogues, such as a Locked Nucleic Acid (LNA) nucleotide unit.

[0116] In some embodiments, the oligonucleotide of the invention is 7, 8 or 9 nucleotides long, and comprises a contiguous nucleotide sequence which is complementary to a seed region of a human or viral microRNA, and wherein at least 75%, such as at least 80%, such as at least 85%, such as at least 90%, such as at least 95%, such as 100% of the nucleotides are Locked Nucleic Acid (LNA) nucleotide units.

[0117] In such oligomers, in some embodiments, the linkage groups are other than phosphodiester linkages, such as are phosphorothioate linkages.

[0118] In one embodiment, all of the nucleotide units of the contiguous nucleotide sequence are LNA nucleotide units.

[0119] In one embodiment, the contiguous nucleotide sequence comprises or consists of 7, 8, 9 or 10, preferably contiguous, LNA nucleotide units.

[0120] In a further preferred embodiment, the oligonucleotide of the invention is 7, 8 or 9 nucleotides long, and comprises a contiguous nucleotide sequence which is complementary to a seed region of a human or viral microRNA, and wherein at least 80% of the nucleotides are LNA, and wherein at least 80%, such as 85%, such as 90%, such as 95%, such as 100% of the internucleotide bonds are phosphorothioate bonds. It will be recognised that the contiguous nucleotide sequence of the oligmer (a seedmer) may extend beyond the seed region.

[0121] In some embodiments, the oligonucleotide of the invention is 7 nucleotides long, which are all LNA.

[0122] In some embodiments, the oligonucleotide of the invention is 8 nucleotides long, of which up to 1 nucleotide may be other than LNA. In some embodiments, the oligonucleotide of the invention is 9 nucleotides long, of which up to 1 or 2 nucleotides may be other than LNA. In some embodiments, the oligonucleotide of the invention is 10 nucleotides long, of which 1, 2 or 3 nucleotides may be other than LNA. The nucleotides ‘other than LNA, may for example, be DNA, or a 2’ substituted nucleotide analogues.

[0123] High affinity nucleotide analogues are nucleotide analogues which result in oligonucleotides which has a higher thermal duplex stability with a complementary RNA nucleotide than the binding affinity of an equivalent DNA nucleotide. This may be determined by measuring the Tₘ.

[0124] In some embodiments, the nucleotide analogue units present in the contiguous nucleotide sequence are selected, optionally independently, from the group consisting of 2′-O_alkyl-RNA unit, 2′-OMe-RNA unit, 2′-amino-DNA unit, 2′-fluoro-DNA unit, LNA unit, PNA unit, HNA unit, INA unit, and a 2′MOE RNA unit.

[0125] In some embodiments, the nucleotide analogue units present in the contiguous nucleotide sequence are selected, optionally independently, from the group consisting of 2′-O_alkyl-RNA unit, 2′-OMe-RNA unit, 2′-amino-DNA unit, 2′-fluoro-DNA unit, LNA unit, and a 2′MOE RNA unit.

[0126] The term 2′ fluoro-DNA refers to a DNA analogue with a substitution to fluorine at the 2′ position (2′F). 2′ fluoro-DNA is a preferred form of 2′ fluoro-nucleotide.

[0127] In some embodiments, the oligomer comprises at least 4 nucleotide analogue units, such as at least 5 nucleotide analogue units, such as at least 6 nucleotide analogue units, such as at least 7 nucleotide analogue units, such as at least 8 nucleotide analogue units, such as at least 9 nucleotide analogue units, such as 10, nucleotide analogue units.

[0128] In one embodiment, the oligomer comprises at least 3 LNA units, such as at least 4 LNA units, such as at least 5 LNA units, such as at least 6 LNA units, such as at least 7 LNA units, such as at least 8 LNA units, such as at least 9 LNA units, such as 10 LNA.

[0129] In one embodiment wherein at least one of the nucleotide analogues, such as LNA units, is either cytosine or guanine, such as between 1-10 of the of the nucleotide analogues, such as LNA units, is either cytosine or guanine, such as 2, 3, 4, 5, 6, 7, 8, or 9 of the of the nucleotide analogues, such as LNA units, is either cytosine or guanine.

[0130] In one embodiment at least two of the nucleotide analogues such as LNA units are either cytosine or guanine. In one embodiment at least three of the nucleotide analogues such as LNA units are either cytosine or guanine. In one embodiment at least four of the nucleotide analogues such as LNA units are either cytosine or guanine. In one embodiment at least five of the nucleotide analogues such as LNA units are either cytosine or guanine. In one embodiment at least six of the nucleotide analogues such as LNA units are either cytosine or guanine. In one embodiment at least seven of the nucleotide analogues such as LNA units are either cytosine or guanine. In one embodiment at least eight of the nucleotide analogues such as LNA units are either cytosine or guanine.

[0131] In a preferred embodiment the nucleotide analogues have a higher thermal duplex stability for a complementary RNA nucleotide than the binding affinity of an equivalent DNA nucleotide to said complementary RNA nucleotide.

[0132] In one embodiment, the nucleotide analogues confer enhanced serum stability to the single stranded oligonucleotide.

[0133] Whilst the specific SEQ IDs in the sequence listing and table 1 refer to oligomers of LNA monomers with phosphorothioate (PS) backbone, it will be recognised that the invention also encompasses the use of other nucleotide analogues and/or linkages, either as an alternative to, or in combination with LNA. As such, the sequence of nucleotides (bases) shown in the sequence listings may be of LNA such as LNA/PS, LNA or may be oligomers containing alternative backbone chemistry, such as sugar/linkage chemistry, whilst retaining the same base sequence (A, T, C or G).

[0134] Whilst it is envisaged that other nucleotide analogues, such as 2′-MOE RNA or 2′-fluoro nucleotides may be useful in the oligomers according to the invention, it is preferred that the oligomers have a high proportion, such as at least 50%, LNA. nucleotides.

[0135] The nucleotide analogue may be a DNA analogue such as a DNA analogue where the 2′-H group is substituted with a substitution other than —OH(RNA) e.g. by substitution with —O—CH₃, —O—CH₂—CH₂—O—CH₃, —O—CH₂—CH₂—CH₂—NH₂, —O—CH₂—CH₂—CH₂—OH or —F. The nucleotide analogue may be a RNA analogues such as a RNA analogue which have been modified in its 2′-OH group, e.g. by substitution with a group other than —H (DNA), for example —O—CH₃, —O—CH₂—CH₂—O—CH₃, —O—CH₂—CH₂—CH₂—NH₂, —O—CH₂—CH₂—CH₂—OH or —F. In one embodiment the nucleotide analogue is “ENA”.

### LNA

[0136] When used in the present context, the terms “LNA unit”, “LNA monomer”, “LNA residue”, “locked nucleic acid unit”, “locked nucleic acid monomer” or “locked nucleic acid residue”, refer to a bicyclic nucleoside analogue. LNA units are described in inter alia WO 99/14226, WO 00/56746, WO 00/56748, WO 01/25248, WO 02/28875, WO 03/006475 and WO 03/095467. The LNA unit may also be defined with respect to its chemical formula. Thus, an “LNA unit”, as used herein, has the chemical structure shown in Scheme 1 below:

[chemical structure]

wherein
[0137] X is selected from the group consisting of O, S and NR^{H}, where R^{H} is H or C₁₋₄-alkyl; Y is (—CH₂)ᵣ, where r is an integer of 1-4; and B is a nitrogenous base.

[0138] In a preferred embodiment of the invention, r is 1 or 2, in particular 1, i.e. a preferred LNA unit has the chemical structure shown in Scheme 2 below:

[chemical structure]

wherein X and B are as defined above.

[0139] In an interesting embodiment, the LNA units incorporated in the oligonucleotides of the invention are independently selected from the group consisting of thio-LNA units, amino-LNA units and oxy-LNA units.

[0140] Thus, the thio-LNA unit may have the chemical structure shown in Scheme 3 below:

[chemical structure]

wherein B is as defined above.

[0141] Preferably, the thio-LNA unit is in its beta-D-form, i.e. having the structure shown in 3A above. likewise, the amino-LNA unit may have the chemical structure shown in Scheme 4 below:

[chemical structure]

wherein B and R^{H} are as defined above.

[0142] Preferably, the amino-LNA unit is in its beta-D-form, i.e. having the structure shown in 4A above.

[0143] The oxy-LNA unit may have the chemical structure shown in Scheme 5 below:

[chemical structure]

wherein B is as defined above.

[0144] Preferably, the oxy-LNA unit is in its beta-D-form, i.e. having the structure shown in 5A above. As indicated above, B is a nitrogenous base which may be of natural or non-natural origin. Specific examples of nitrogenous bases include adenine (A), cytosine (C), 5-methylcytosine (^{Me}C), isocytosine, pseudoisocytosine, guanine (G), thymine (T), uracil (U), 5-bromouracil, 5-propynyluracil, 5-propyny-6,5-methylthiazoleuracil, 6-aminopurine, 2-aminopurine, inosine, 2,6-diaminopurine, 7-propyne-7-deazaadenine, 7-propyne-7-deazaguanine and 2-chloro-6-aminopurine.

[0145] The term “thio-LNA unit” refers to an LNA unit in which X in Scheme 1 is S. A thio-LNA unit can be in both the beta-D form and in the alpha-L form. Generally, the beta-D form of the thio-LNA unit is preferred. The beta-D-form and alpha-L-form of a thio-LNA unit are shown in Scheme 3 as compounds 3A and 3B, respectively.

[0146] The term “amino-LNA unit” refers to an LNA unit in which X in Scheme 1 is NH or NR^{H}, where R^{H} is hydrogen or C₁₋₄-alkyl. An amino-LNA unit can be in both the beta-D form and in the alpha-L form. Generally, the beta-D form of the amino-LNA unit is preferred. The beta-D-form and alpha-L-form of an amino-LNA unit are shown in Scheme 4 as compounds 4A and 4B, respectively.

[0147] The term “oxy-LNA unit” refers to an LNA unit in which X in Scheme 1 is 0. An Oxy-LNA unit can be in both the beta-D form and in the alpha-L form. Generally, the beta-D form of the oxy-LNA unit is preferred. The beta-D form and the alpha-L form of an oxy-LNA unit are shown in Scheme 5 as compounds 5A and 5B, respectively.

[0148] In the present context, the term “C₁₋₆-alkyl” is intended to mean a linear or branched saturated hydrocarbon chain wherein the longest chains has from one to six carbon atoms, such as methyl, ethyl, n-propyl, isopropyl, n-butyl, isobutyl, sec-butyl, tert-butyl, pentyl, isopentyl, neopentyl and hexyl. A branched hydrocarbon chain is intended to mean a C₁₋₆-alkyl substituted at any carbon with a hydrocarbon chain.

[0149] In the present context, the term “C₁₋₄-alkyl” is intended to mean a linear or branched saturated hydrocarbon chain wherein the longest chains has from one to four carbon atoms, such as methyl, ethyl, n-propyl, isopropyl, n-butyl, isobutyl, sec-butyl and tert-butyl. A branched hydrocarbon chain is intended to mean a C₁₋₄-alkyl substituted at any carbon with a hydrocarbon chain.

[0150] When used herein the term “C₁₋₆-alkoxy” is intended to mean C₁₋₆-alkyl-oxy, such as methoxy, ethoxy, n-propoxy, isopropoxy, n-butoxy, isobutoxy, sec-butoxy, tert-butoxy, pentoxy, isopentoxy, neopentoxy and hexoxy.

[0151] In the present context, the term “C₂₋₆-alkenyl” is intended to mean a linear or branched hydrocarbon group having from two to six carbon atoms and containing one or more double bonds. Illustrative examples of C₂₋₆-alkenyl groups include allyl, homo-allyl, vinyl, crotyl, butenyl, butadienyl, pentenyl, pentadienyl, hexenyl and hexadienyl. The position of the unsaturation (the double bond) may be at any position along the carbon chain.

[0152] In the present context the term “C₂₋₆-alkynyl” is intended to mean linear or branched hydrocarbon groups containing from two to six carbon atoms and containing one or more triple bonds. Illustrative examples of C₂₋₆-alkynyl groups include acetylene, propynyl, butynyl, pentynyl and hexynyl. The position of unsaturation (the triple bond) may be at any position along the carbon chain. More than one bond may be unsaturated such that the “C₂₋₆-alkynyl” is a di-yne or enedi-yne as is known to the person skilled in the art.

[0153] When referring to substituting a DNA unit by its corresponding LNA unit in the context of the present invention, the term “corresponding LNA unit” is intended to mean that the DNA unit has been replaced by an LNA unit containing the same nitrogenous base as the DNA unit that it has replaced, e.g. the corresponding LNA unit of a DNA unit containing the nitrogenous base A also contains the nitrogenous base A. The exception is that when a DNA unit contains the base C, the corresponding LNA unit may contain the base C or the base ^{Me}C, preferably ^{Me}C.

[0154] Herein, the term “non-LNA unit” refers to a nucleoside different from an LNA-unit, i.e. the term “non-LNA unit” includes a DNA unit as well as an RNA unit. A preferred non-LNA unit is a DNA unit.

[0155] The terms “unit”, “residue” and “monomer” are used interchangeably herein.

[0156] The term “at least one” encompasses an integer larger than or equal to 1, such as 1, 2, 3, 4, 5, 6, 7, 8, 9, 10, 11, 12, 13, 14, 15, 16, 17, 18, 19, 20 and so forth.

[0157] The terms “a” and “an” as used about a nucleotide, an agent, an LNA unit, etc., is intended to mean one or more. In particular, the expression “a component (such as a nucleotide, an agent, an LNA unit, or the like) selected from the group consisting of . . . ” is intended to mean that one or more of the cited components may be selected. Thus, expressions like “a component selected from the group consisting of A, B and C” is intended to include all combinations of A, B and C, i.e. A, B, C, A+B, A+C, B+C and A+B+C.

### Internucleoside Linkages

[0158] The term “internucleoside linkage group” is intended to mean a group capable of covalently coupling together two nucleotides, such as between DNA units, between DNA units and nucleotide analogues, between two non-LNA units, between a non-LNA unit and an LNA unit, and between two LNA units, etc. Examples include phosphate, phosphodiester groups and phosphorothioate groups.

[0159] In some embodiments, at least one of, such as all of the internucleoside linkage in the oligomer is phosphodiester. However for in vivo use, phosphorothioate linkages may be preferred.

[0160] Typical internucleoside linkage groups in oligonucleotides are phosphate groups, but these may be replaced by internucleoside linkage groups differing from phosphate. In a further interesting embodiment of the invention, the oligonucleotide of the invention is modified in its internucleoside linkage group structure, i.e. the modified oligonucleotide comprises an internucleoside linkage group which differs from phosphate. Accordingly, in a preferred embodiment, the oligonucleotide according to the present invention comprises at least one internucleoside linkage group which differs from phosphate.

[0161] Specific examples of internucleoside linkage groups which differ from phosphate

[0162] (—O—P(O)₂—O—) include —O—P(O,S)—O—, —O—P(S)₂—O—, —S—P(O)₂—O—, —S—P(O,S)—O—, —S—P(S)₂—O—, —O—P(O)₂—S—, —O—P(O,S)—S—, —S—P(O)₂—S—, —O—PO(R^{H})—O—, O—PO(OCH₃)—O—, —O—PO(NR^{H})—O—, —O—PO(OCH₂CH₂S—R)—O—, —O—PO(BH₃)—O—, —O—PO(NHR^{H})—O—, —O—P(O)₂—NR^{H}—, —NR^{H}—P(O)₂—O—, —NR^{H}—CO—O—, —NR^{H}—CO—NR^{H}—, —NR^{H}—CO—CH₂—, —O—CH₂—CO—NR^{H}—, —O—CH₂—CH₂—NR^{H}—, —CO—NR^{H}—CH₂—, —CH₂—NR^{H}—CO—, —S—CH₂—CH₂—S—, —CH₂—SO₂—CH₂—, —CH₂—CO—NR^{H}—, —O—CH₂—CH₂—NR^{H}—CO—, —CH₂—NCH₃—O—CH₂—, where R^{H} is hydrogen or C₁₋₄-alkyl.

[0163] When the internucleoside linkage group is modified, the internucleoside linkage group is preferably a phosphorothioate group (—O—P(O,S)—O—). In a preferred embodiment, all internucleoside linkage groups of the oligonucleotides according to the present invention are phosphorothioate.

[0164] The internucleoside linkage may be selected form the group consisting of: —O—P(O)₂—O—, —O—P(O,S)—O—, —O—P(S)₂—O—, —S—P(O)₂—O—, —S—P(O,S)—O—, —S—P(S)₂—O—, —O—P(O)₂—S—, —O—P(O,S)—S—, —S—P(O)₂—S—, —O—PO(R^{H})—O—, O—PO(OCH₃)—O—, —O—PO(NR^{H})—O—, —O—PO(OCH₂CH₂S—R)—O—, —O—PO(BH₃)—O—, —O—PO(NHR^{H})—O—, —O—P(O)₂—NR^{H}—, —NR^{H}—P(O)₂—O—, —NR^{H}—CO—O—, —NR^{H}—CO—NR^{H}—, and/or the internucleoside linkage may be selected form the group consisting of: —O—CO—O—, —O—CO—NR^{H}—, —NR^{H}—CO—CH₂—, —O—CH₂—CO—NR^{H}—, —O—CH₂—CH₂—NR^{H}—, —CO—NR^{H}—CH₂—, —CH₂—NR^{H}—CO—, —O—CH₂—CH₂—S—, —S—CH₂—CH₂—O—, —S—CH₂—CH₂—S—, —CH₂—SO₂—CH₂—, —CH₂—CO—NR^{H}—, —O—CH₂—CH₂—NR^{H}—CO—, —CH₂—NCH₃—O—CH₂—, where R^{H} is selected from hydrogen and C₁₋₄-alkyl. Suitably, in some embodiments, sulphur (S) containing internucleoside linkages as provided above may be preferred. The internucleoside linkages may be independently selected, or all be the same, such as phosphorothioate linkages.

[0165] In one embodiment, at least 75%, such as 80% or 85% or 90% or 95% or all of the internucleoside linkages present between the nucleotide units of the contiguous nucleotide sequence are phosphorothioate internucleoside linkages.

Micromir Oligonucleotides Targeting More than One MicroRNA

[0166] In one embodiment, the contiguous nucleotide sequence is complementary to the corresponding sequence of at least two miRNA sequences such as 2, 3, 4, 5, 6, 7, 8, 9, or 10 miRNA sequence. The use of a single universal base may allow a single oligomer of the invention to target two independant microRNAs which either one or both have a single mismatch in the region which corresponds to oligomer at the position where the universal nucleotide is positioned.

[0167] In one embodiment, the contiguous nucleotide sequence consists of or comprises a sequence which is complementary to the sequence of at least two miRNA seed region sequences such as 2, 3, 4, 5, 6, 7, 8, 9, or 10 miRNA seed region sequences.

[0168] In one embodiment, the contiguous nucleotide sequence is complementary to the corresponding region of both miR-221 and miR-222.

[0169] In one embodiment, the contiguous nucleotide sequence is complementary to the corresponding region of more than one member of the miR-17-92 cluster—such as two or more or all of miR-17-5p, miR-20a/b, miR-93, miR-106a/b; or two or more or all of miR-25, miR-92a and miR-363.

[0170] In one embodiment, the contiguous nucleotide sequence consists of or comprises a sequence that is complementary to 5′GCTACAT3′.

### Oligomer Design

[0171] In one embodiment, the first nucleotide of the oligomer according to the invention, counting from the 3′ end, is a nucleotide analogue, such as an LNA unit. In one embodiment, which may be the same or different, the last nucleotide of the oligomer according to the invention, counting from the 3′ end, is a nucleotide analogue, such as an LNA unit.

[0172] In one embodiment, the second nucleotide of the oligomer according to the invention, counting from the 3′ end, is a nucleotide analogue, such as an LNA unit.

[0173] In one embodiment, the ninth and/or the tenth nucleotide of the oligomer according to the invention, counting from the 3′ end, is a nucleotide analogue, such as an LNA unit.

[0174] In one embodiment, the ninth nucleotide of the oligomer according to the invention, counting from the 3′ end is a nucleotide analogue, such as an LNA unit.

[0175] In one embodiment, the tenth nucleotide of the oligomer according to the invention, counting from the 3′ end is a nucleotide analogue, such as an LNA unit.

[0176] In one embodiment, both the ninth and the tenth nucleotide of the oligomer according to the invention, calculated from the 3′ end is a nucleotide analogue, such as an LNA unit.

[0177] In one embodiment, the oligomer according to the invention does not comprise a region of more than 3 consecutive DNA nucleotide units. In one embodiment, the oligomer according to the invention does not comprise a region of more than 2 consecutive DNA nucleotide units.

[0178] In one embodiment, the oligomer comprises at least a region consisting of at least two consecutive nucleotide analogue units, such as at least two consecutive LNA units.

[0179] In one embodiment, the oligomer comprises at least a region consisting of at least three consecutive nucleotide analogue units, such as at least three consecutive LNA units.

### Other Patterns of Nucleotide Analogues Such as LNA in the Oligomer

[0180] Whilst it is envisaged that oligomers containing at least 6 LNA, such as at least 7 nucleotide units may be preferable, the discovery that such short oligomers are highly effective at targeting microRNAs in vivo can be used to prepare shorter oligomers of the invention which comprise other nucleotide analogues, such as high affinity nucleotide analogues. Indeed, the combination of LNA with other high affinity nucleotide analogues are considered as part of the present invention.

[0181] Modification of nucleotides in positions 1 to 2, counting from the 3′ end. The nucleotide at positions 1 and/or 2 may be a nucleotide analogue, such as a high affinity nucleotide analogue, such as LNA, or a nucleotide analogue selected from the group consisting of 2′-O-alkyl-RNA unit, 2′-OMe-RNA unit, 2′-amino-DNA unit, 2′-fluoro-DNA unit, 2′-MOE-RNA unit, LNA unit, PNA unit, HNA unit, INA unit. The two 3′ nucleotide may therefore be

[0182] Xx, xX, XX or xx, wherein: In one embodiment X is LNA and x is DNA or another nucleotide analogue, such as a 2′ substituted nucleotide analogue selected from the group consisting of 2′-O_alkyl-RNA unit, 2′-OMe-RNA unit, 2′-amino-DNA unit, 2′-fluoro-DNA unit, LNA, and a 2′MOE RNA unit. Said non-LNA unit (x) may therefore be 2′MOE RNA or 2′-fluoro-DNA. Alternatively X is a nucleotide analogue, and x is DNA.

[0183] The above modification at the 2 3′ terminal nucleotides may be combined with modification of nucleotides in positions 3-8 counting from the 3′ end, as described below. In this respect nucleotides designated as X and x may be the same throughout the oligomer. It will be noted that when the oligomer is only 7 nucleotides in length the 8^{th} nucleotide counting from the 3′ end should be discarded. In the following embodiments which refer to the modification of nucleotides in positions 3 to 8, counting from the 3′ end, the LNA units, in one embodiment, may be replaced with other nucleotide anlogues, such as those referred to herein. “X” may, therefore be selected from the group consisting of 2′-O-alkyl-RNA unit, 2′-OMe-RNA unit, 2′-amino-DNA unit, 2′-fluoro-DNA unit, 2′-MOE-RNA unit, LNA unit, PNA unit, HNA unit, INA unit. “x” is preferably DNA or RNA, most preferably DNA. However, it is preferred that X is LNA.

[0184] In one embodiment of the invention, the oligonucleotides of the invention are modified in positions 3 to 8, counting from the 3′ end. The design of this sequence may be defined by the number of non-LNA units present or by the number of LNA units present. In a preferred embodiment of the former, at least one, such as one, of the nucleotides in positions three to eight, counting from the 3′ end, is a non-LNA unit. In another embodiment, at least two, such as two, of the nucleotides in positions three to eight, counting from the 3′ end, are non-LNA units. In yet another embodiment, at least three, such as three, of the nucleotides in positions three to eight, counting from the 3′ end, are non-LNA units. In still another embodiment, at least four, such as four, of the nucleotides in positions three to eight, counting from the 3′ end, are non-LNA units. In a further embodiment, at least five, such as five, of the nucleotides in positions three to eight, counting from the 3′ end, are non-LNA units. In yet a further embodiment, all six nucleotides in positions three to eight, counting from the 3′ end, are non-LNA units.

[0185] Alternatively defined, in an embodiment, the oligonucleotide according to the present invention comprises at least three LNA units in positions three to eight, counting from the 3′ end. In an embodiment thereof, the oligonucleotide according to the present invention comprises three LNA units in positions three to eight, counting from the 3° end. The substitution pattern for the nucleotides in positions three to eight, counting from the 3′ end, may be selected from the group consisting of XXXxxx, xXXXxx, xxXXXx, xxxXXX, XXxXxx, XXxxXx, XXxxxX, xXXxXx, xXXxxX, xxXXxX, XxXXxx, XxxXXx, XxxxXX, xXxXXx, xXxxXX, xxXxXX, xXxXxX and XxXxXx, wherein “X” denotes an LNA unit and “x” denotes a non-LNA unit. In a preferred embodiment, the substitution pattern for the nucleotides in positions three to eight, counting from the 3′ end, is selected from the group consisting of XXxXxx, XXxxXx, XXxxxX, xXXxXx, xXXxxX, xxXXxX, XxXXxx, XxxXXx, XxxxXX, xXxXXx, xXxxXX, xxXxXX, xXxXxX and XxXxXx, wherein “X” denotes an LNA unit and “x” denotes a non-LNA unit. In a more preferred embodiment, the substitution pattern for the nucleotides in positions three to eight, counting from the 3′ end, is selected from the group consisting of xXXxXx, xXXxxX, xxXXxX, xXxXXx, xXxxXX, xxXxXX and xXxXxX, wherein “X” denotes an LNA unit and “x” denotes a non-LNA unit. In an embodiment, the substitution pattern for the nucleotides in positions three to eight, counting from the 3′ end, is xXxXxX or XxXxXx, wherein “X” denotes an LNA unit and “x” denotes a non-LNA unit. In an embodiment, the substitution pattern for the nucleotides in positions three to eight, counting from the 3′ end, is xXxXxX, wherein “X” denotes an LNA unit and “x” denotes a non-LNA unit.

[0186] In a further embodiment, the oligonucleotide according to the present invention comprises at least four LNA units in positions three to eight, counting from the 3′ end. In an embodiment thereof, the oligonucleotide according to the present invention comprises four LNA units in positions three to eight, counting from the 3′ end. The substitution pattern for the nucleotides in positions three to eight, counting from the 3′ end, may be selected from the group consisting of xxXXXX, xXxXXX, xXXxXX, xXXXxX, xXXXXx, XxxXXX, XxXxXX, XxXXxX, XxXXXx, XXxxXX, XXxXxX, XXxXXx, XXXxxX, XXXxXx and XXXXxx, wherein “X” denotes an LNA unit and “x” denotes a non-LNA unit.

[0187] In yet a further embodiment, the oligonucleotide according to the present invention comprises at least five LNA units in positions three to eight, counting from the 3′ end. In an embodiment thereof, the oligonucleotide according to the present invention comprises five LNA units in positions three to eight, counting from the 3° end. The substitution pattern for the nucleotides in positions three to eight, counting from the 3′ end, may be selected from the group consisting of xXXXXX, XxXXXX, XXxXXX, XXXxXX, XXXXxX and XXXXXx, wherein “X” denotes an LNA unit and “x” denotes a non-LNA unit.

[0188] Preferably, the oligonucleotide according to the present invention comprises one or two LNA units in positions three to eight, counting from the 3′ end. This is considered advantageous for the stability of the A-helix formed by the oligo:microRNA duplex, a duplex resembling an RNA:RNA duplex in structure.

[0189] In yet a further embodiment, the oligonucleotide according to the present invention comprises at least six LNA units in positions three to eight, counting from the 3′ end. In an embodiment thereof, the oligonucleotide according to the present invention comprises at from three to six LNA units in positions three to eight, counting from the 3′ end, and in addition from none to three other high affinity nucleotide analogues in the same region, such that the total amount of high affinity nucleotide analogues (including the LNA units) amount to six in the region from positions three to eight, counting from the 3′ end.

[0190] In some embodiments, such as when X is LNA, said non-LNA unit (x) is another nucleotide analogue unit, such as a 2′ substituted nucleotide analogue selected from the group consisting of 2′-O_alkyl-RNA unit, 2′-OMe-RNA unit, 2′-amino-DNA unit, 2′-fluoro-DNA unit, LNA, and a 2′MOE RNA unit. Said non-LNA unit (x) may therefore be 2′MOE RNA or 2′-fluoro-DNA.

[0191] For oligomers which have 9 or 10 nucleotides, the nucleotide at positions 9 and/or 10 may be a nucleotide analogue, such as a high affinity nucleotide analogue, such as LNA, or a nucleotide analogue selected from the group consisting of 2′-O-alkyl-RNA unit, 2′-OMe-RNA unit, 2′-amino-DNA unit, 2′-fluoro-DNA unit, 2′-MOE-RNA unit, LNA unit, PNA unit, HNA unit, INA unit. The two 5′ nucleotides may therefore be

[0192] Xx, xX, XX or xx, wherein: In one embodiment X is LNA and x is DNA or another nucleotide analogue, such as a 2′ substituted nucleotide analogue selected from the group consisting of 2′-O_alkyl-RNA unit, 2′-OMe-RNA unit, 2′-amino-DNA unit, 2′-fluoro-DNA unit, LNA, and a 2′MOE RNA unit. Said non-LNA unit (x) may therefore be 2′MOE RNA or 2′-fluoro-DNA. Alternatively X is a nucleotide analogue, and x is DNA.

[0193] The above modification at the 2 5′ terminal nucleotides may be combined with modification of nucleotides in positions 3-8 counting from the 3′ end, and/or the 2 3′ nucleotides as described above. In this respect nucleotides designated as X and x may be the same throughout the oligomer.

[0194] In a preferred embodiment of the invention, the oligonucleotide according to the present invention contains an LNA unit at the 5′ end. In another preferred embodiment, the oligonucleotide according to the present invention contains an LNA unit at the first two positions, counting from the 5′ end.

[0195] In one embodiment, the invention further provides for an oligomer as described in the context of the pharmaceutical composition of the invention, or for use in vivo in an organism, such as a medicament, wherein said oligomer (or contiguous nucleotide sequence) comprises either

[0196] i) at least one phosphorothioate linkage and/or

[0197] ii) at least one 3′ terminal LNA unit, and/or

[0198] iii) at least one 5′ terminal LNA unit.

[0199] The oligomer may therefore contain at least one phosphorothioate linkage, such as all linkages being phosphorthioates, and at least one 3′ terminal LNA unit, and at least one 5′ terminal LNA unit.

[0200] It is preferable for most therapeutic uses that the oligonucleotide is fully phosphorothiolated—an exception being for therapeutic oligonucleotides for use in the CNS, such as in the brain or spine where phosphorothioation can be toxic, and due to the absence of nucleases, phosphodiester bonds may be used, even between consecutive DNA units.

[0201] As referred to herein, other in one aspect of the oligonucleotide according to the invention is that the second 3′ nucleotide, and/or the 9^{th} and 10^{th} (from the 3′ end), if present, may also be LNA.

[0202] In one embodiment, the oligomer comprises at least five nucleotide analogue units, such as at least five LNA units, in positions which are complementary to the miRNA seed region.

[0203] In one embodiment, the nucleotide sequence of the oligomer which is complementary to the sequence of the microRNA seed region, is selected from the group consisting of (X)xXXXXX, (X)XxXXXX, (X)XXxXXX, (X)XXXxXX, (X)XXXXxX and (X)XXXXXx, wherein “X” denotes a nucleotide analogue, such as an LNA unit, (X) denotes an optional nucleotide analogue, such as an LNA unit, and “x” denotes a DNA or RNA nucleotide unit.

[0204] In one embodiment, the oligomer comprises six or seven nucleotide analogue units, such as six or seven LNA units, in positions which are complementary to the miRNA seed region.

[0205] In one embodiment, the nucleotide sequence of the oligomer which is complementary to the sequence of the microRNA seed region, is selected from the group consisting of XXXXXX, XxXXXXX, XXxXXXX, XXXxXXX, XXXXxXX, XXXXXxX and XXXXXXx, wherein “X” denotes a nucleotide analogue, such as an LNA unit, such as an LNA unit, and “x” denotes a DNA or RNA nucleotide unit.

[0206] In one embodiment, the two nucleotide motif at position 7 to 8, counting from the 3′ end of the oligomer is selected from the group consisting of xx, XX, xX and Xx, wherein “X” denotes a nucleotide analogue, such as an LNA unit, such as an LNA unit, and “x” denotes a DNA or RNA nucleotide unit.

[0207] In one embodiment, the two nucleotide motif at position 7 to 8, counting from the 3′ end of the oligomer is selected from the group consisting of XX, xX and Xx, wherein “X” denotes a nucleotide analogue, such as an LNA unit, such as an LNA unit, and “x” denotes a DNA or RNA nucleotide unit.

[0208] In one embodiment, the oligomer comprises at 12 nucleotides and wherein the two nucleotide motif at position 11 to 12, counting from the 3′ end of the oligomer is selected from the group consisting of xx, XX, xX and Xx, wherein “X” denotes a nucleotide analogue, such as an LNA unit, such as an LNA unit, and “x” denotes a DNA or RNA nucleotide unit.

[0209] In one embodiment, the oligomer comprises 12 nucleotides and wherein the two nucleotide motif at position 11 to 12, counting from the 3′ end of the oligomer is selected from the group consisting of XX, xX and Xx, wherein “X” denotes a nucleotide analogue, such as an LNA unit, such as an LNA unit, and “x” denotes a DNA or RNA nucleotide unit, such as a DNA unit.

[0210] In one embodiment, the oligomer comprises a nucleotide analogue unit, such as an LNA unit, at the 5′ end.

[0211] In one embodiment, the nucleotide analogue units, such as X, are independently selected form the group consisting of: 2′-O-alkyl-RNA unit, 2′-OMe-RNA unit, 2′-amino-DNA unit, 2′-fluoro-DNA unit, 2′-MOE-RNA unit, LNA unit, PNA unit, HNA unit, INA unit.

[0212] In one embodiment, all the nucleotides of the oligomer of the invention are nucleotide analogue units.

[0213] In one embodiment, the nucleotide analogue units, such as X, are independently selected form the group consisting of: 2′-OMe-RNA units, 2′-fluoro-DNA units, and LNA units.

[0214] In one embodiment, the oligomer comprises said at least one LNA analogue unit and at least one further nucleotide analogue unit other than LNA.

[0215] In one embodiment, the non-LNA nucleotide analogue unit or units are independently selected from 2′-OMe RNA units and 2′-fluoro DNA units.

[0216] In one embodiment, the oligomer consists of at least one sequence XYX or YXY, wherein X is LNA and Y is either a 2′-OMe RNA unit and 2′-fluoro DNA unit.

[0217] In one embodiment, the sequence of nucleotides of the oligomer consists of alternative X and Y units.

[0218] In one embodiment, the oligomer comprises alternating LNA and DNA units (Xx) or (xX). In one embodiment, the oligomer comprises a motif of alternating LNA followed by 2 DNA units (Xxx), xXx or xxX.

[0219] In one embodiment, at least one of the DNA or non-LNA nucleotide analogue units are replaced with a LNA nucleotide in a position selected from the positions identified as LNA nucleotide units in any one of the embodiments referred to above. In one embodiment,“X” donates an LNA unit.

### Further Designs for Oligomers of the Invention

[0220] Table 1 below provides non-limiting examples of short microRNA sequences that could advantageously be targeted with an oligonucleotide of the present invention.

[0221] The oligonucleotides according to the invention, such as those disclosed in table 1 may, in one embodiment, have a sequence of 7, 8, 9 or 10 LNA nucleotides 5′-3′ LLLLLLL(L)(L)(L)(L), or have a sequence of nucleotides selected form the group consisting of, the first 7, 8, 9 or 10 nucleotides of the following motifs:

[0222] LdLddL(L)(d)(d)(L)(d)(L)(d)(L)(L), LdLdLL(L)(d)(d)(L)(L)(L)(d)(L)(L), LMLMML(L)(M)(M)(L)(M)(L)(M)(L)(L), LMLMLL(L)(M)(M)(L)(L)(L)(M)(L)(L), LFLFFL(L)(F)(F)(L)(F)(L)(F)(L)(L), LFLFLL(L)(F)(F)(L)(L)(L)(F)(L)(L), and every third designs such as; LddLdd(L)(d)(d)(L)(d)(d)(L)(d)(d)(L)(d)′dLddLd(d)(L)(d)(d)(L)(d)(d)(L)(d)(d)(L), ddLddL(d)(d)(L)(d)(d)(L)(d)(d)(L)(d)(d), LMMLMM(L)(M)(M)(L)(M)(M)(L)(M)(M)(L)(M), MLMMLM(M)(L)(M)(M)(L)(M)(M)(L)(M)(M)(L), MMLMML(M)(M)(L)(M)(M)(L)(M)(M)(L)(M)(M), LFFLFF(L)(F)(F)(L)(F)(F)(L)(F)(F)(L)(F), FLFFLF(F)(L)(F)(F)(L)(F)(F)(L)(F)(F)(L), FFLFFL(F)(F)(L)(F)(F)(L)(F)(F)(L)(F)(F), and dLdLdL(d)(L)(d)(L)(d)(L)(d)(L)(d)(L)(d) and an every second design, such as; LdLdLd(L)(d)(L)(d)(L)(d)(L)(d)(L)(d)(L), MLMLML(M)(L)(M)(L)(M)(L)(M)(L)(M)(L)(M), LMLMLM(L)(M)(L)(M)(L)(M)(L)(M)(L)(M)(L), FLFLFL(F)(L)(F)(L)(F)(L)(F)(L)(F)(L)(F), and LFLFLF(L)(F)(L)(F)(L)(F)(L)(F)(L)(F)(L); wherein L=LNA unit, d=DNA units, M=2′MOE RNA, F=2′Fluoro and residues in brackets are optional.

### Pharmaceutical Composition and Medical Application

[0223] The invention provides for a pharmaceutical composition comprising the oligomer according to the invention, and a pharmaceutically acceptable diluent, carrier, salt or adjuvant.

[0224] The invention further provides for the use of an oligonucleotide according to the invention, such as those which may form part of the pharmaceutical composition, for the manufacture of a medicament for the treatment of a disease or medical disorder associated with the presence or over-expression (upregulation) of the microRNA.

[0225] The invention further provides for a method for the treatment of a disease or medical disorder associated with the presence or over-expression of the microRNA, comprising the step of administering a composition (such as the pharmaceutical composition) according to the invention to a person in need of treatment.

[0226] The invention further provides for a method for reducing the effective amount of a miRNA in a cell or an organism, comprising administering a composition (such as the pharmaceutical composition) according to the invention or a oligomer according to the invention to the cell or the organism. Reducing the effective amount in this context refers to the reduction of functional miRNA present in the cell or organism. It is recognised that the preferred oligonucleotides according to the invention may not always significantly reduce the actual amount of miRNA in the cell or organism as they typically form very stable duplexes with their miRNA targets. The reduction of the effective amount of the miRNA in a cell may, in one embodiment, be measured by detecting the level of de-repression of the miRNA's target in the cell.

[0227] The invention further provides for a method for de-repression of a target mRNA of a miRNA in a cell or an organism, comprising administering a composition (such as the pharmaceutical composition) or a oligomer according to the invention to the cell or the organism.

[0228] The invention further provides for the use of a oligomer of between 7-10 such as 7, 8, 9, or 10 nucleotides in length, for the manufacture of a medicament for the treatment of a disease or medical disorder associated with the presence or over-expression of the microRNA.

[0229] In one embodiment the medical condition (or disease) is hepatitis C(HCV), and the miRNA is miR-122.

[0230] In one embodiment, the pharmaceutical composition according to the invention is for use in the treatment of a medical disorder or disease selected from the group consisting of: hepatitis C virus infection and hypercholesterolemia and related disorders, and cancers.

[0231] In one embodiment the medical disorder or disease is a CNS disease, such as a CNS disease where one or more microRNAs are known to be indicated.

[0232] In the context of hypercholesterolemia related disorders refers to diseases such as atherosclerosis or hyperlipidemia. Further examples of related diseases also include different types of HDL/LDL cholesterol imbalance; dyslipidemias, e.g., familial combined hyperlipidemia (FCHL), acquired hyperlipidemia, statin-resistant hypercholesterolemia; coronary artery disease (CAD) coronary heart disease (CHD), atherosclerosis.

[0233] In one embodiment, the pharmaceutical composition according to the invention further comprises a second independent active ingredient that is an inhibitor of the VLDL assembly pathway, such as an ApoB inhibitor, or an MTP inhibitor (such as those disclosed in U.S. 60/977,497, hereby incorporated by reference).

[0234] The invention further provides for a method for the treatment of a disease or medical disorder associated with the presence or over-expression of the microRNA, comprising the step of administering a composition (such as the pharmaceutical composition) comprising a oligomer of between 7-10 such as 7, 8, 9, or 10 nucleotides in length, to a person in need of treatment.

[0235] The invention further provides for a method for reducing the effective amount of a miRNA target (i.e. ‘available’ miRNA) in a cell or an organism, comprising administering a composition (such as the pharmaceutical composition) comprising a oligomer of between 6 7-10 such as 7, 8, 9, or 10 nucleotides in length, to the cell or the organism.

[0236] It should be recognised that “reducing the effective amount” of one or more microRNAs in a cell or organism, refers to the inhibition of the microRNA function in the call or organism. The cell is preferably amammalain cell or a human cell which expresses the microRNA or microRNAs.

[0237] The invention further provides for a method for de-repression of a target mRNA of a miRNA in a cell or an organism, comprising a oligomer of 7-10 such as 7, 8, 9, or 10 nucleotides in length, or (or a composition comprising said oligonucleotide) to the cell or the organism.

[0238] As mentioned above, microRNAs are related to a number of diseases. Hence, a fourth aspect of the invention relates to the use of an oligonucleotide as defined herein for the manufacture of a medicament for the treatment of a disease associated with the expression of microRNAs selected from the group consisting of spinal muscular atrophy, Tourette's syndrome, hepatitis C, fragile X mental retardation, DiGeorge syndrome and cancer, such as in non limiting example, chronic lymphocytic leukemia, breast cancer, lung cancer and colon cancer, in particular cancer.

### Methods of Synthesis

[0239] The invention further provides for a method for the synthesis of an oligomer targeted against a human microRNA, such as an oligomer described herein, said method comprising the steps of:
[0240] a. Optionally selecting a first nucleotide, counting from the 3′ end, which is a nucleotide analogue, such as an LNA nucleotide.
[0241] b. Optionally selecting a second nucleotide, counting from the 3′ end, which is a nucleotide analogue, such as an LNA nucleotide.
[0242] c. Selecting a region of the oligomer which corresponds to the miRNA seed region, wherein said region is as defined herein.
[0243] d. Selecting a seventh and optionally an eight nucleotideas defined herein.
[0244] e. Optionally selecting one or two further 5′ terminal of the oligomer is as defined herein;

[0245] wherein the synthesis is performed by sequential synthesis of the regions defined in steps a-e, wherein said synthesis may be performed in either the 3′-5′ (a to f) or 5′-3′ (e to a)direction, and wherein said oligomer is complementary to a sequence of the miRNA target.

[0246] The invention further provides for a method for the preparation of an oligomer (such as an oligomer according to the invention), said method comprising the steps of a) comparing the sequences of two or more miRNA sequences to identify two or more miRNA sequences which comprise a common contiguous nucleotide sequence of at least 7 nucleotides in length, such as 7, 8, 9 or 10 nucleotides in length (i.e. a sequence found in both non-identical miRNAs), b) preparing an oligomer sequence which consists or comprises of a contiguous nucleotide sequence with is complementary to said common contiguous nucleotide sequence, wherein said oligomer is, as according to the oligomer of the invention. In a preferred example, the common contiguous nucleotide sequence consists or comprises of the seed region of each of said two or more miRNA sequences (which comprise a common contiguous nucleotide sequence of at least 6 nucleotides in length). In one embodiment, the seed regions of the two or more miRNAs are identical. Suitably the oligomer consists or comprises a seedmer sequence of 7 or 8 nucleotides in length which comprises of a sequence which is complementary to said two or more miRNAs. This method may be used in conjunction with step c of the above method.

[0247] The method for the synthesis of the oligomer according to the invention may be performed using standard solid phase oligonucleotide systhesis.

[0248] In one embodiment, the method for the synthesis of a oligomer targeted against a human microRNA, is performed in the 3′ to 5′ direction a-e. A further aspect of the invention is a method to reduce the levels of target microRNA by contacting the target microRNA to an oligonucleotide as defined herein, wherein the oligonucleotide (i) is complementary to the target microRNA sequence (ii) does not contain a nucleotide at the 3′ end that corresponds to the first 5′ end nucleotide of the target microRNA.

### Duplex Stability and Tₘ

[0249] In one embodiment, the oligomer of the invention is capable of forming a duplex with a complementary single stranded RNA nucleic acid molecule (typically of about the same length of said single stranded oligonucleotide) with phosphodiester internucleoside linkages, wherein the duplex has a Tₘ of between 30° C. and 70° C. or 80° C., such as between 30° C. and 60° C. of 70° C., or between 30° C. and 50° C. or 60° C. In one embodiment the Tₘ is at least 40° C. Tₘ may be determined by determining the Tₘ of the oligomer and a complementary RNA target in the following buffer conditions: 100 mM NaCl, 0.1 mM EDTA, 10 mM Na-phosphate, pH 7.0 (see examples for a detailed protocol). A high affinity analogue may be defined as an analogue which, when used in the oligomer of the invention, results in an increase in the Tₘ of the oligomer as compared to an identical oligomer which has contains only DNA bases.

### Conjugates

[0250] In one embodiment, said oligomer is conjugated with one or more non-nucleotide (or poly-nucleotide) compounds.

[0251] In the context the term “conjugate” is intended to indicate a heterogenous molecule formed by the covalent attachment (“conjugation”) of the oligomer as described herein to one or more non-nucleotide, or non-polynucleotide moieties. Examples of non-nucleotide or non-polynucleotide moieties include macromolecular agents such as proteins, fatty acid chains, sugar residues, glycoproteins, polymers, or combinations thereof. Typically proteins may be antibodies for a target protein. Typical polymers may be polyethylene glycol.

[0252] Therefore, in various embodiments, the oligomer of the invention may comprise both a polynucleotide region which typically consists of a contiguous sequence of nucleotides, and a further non-nucleotide region. When referring to the oligomer of the invention consisting of a contiguous nucleotide sequence, the compound may comprise non-nucleotide components, such as a conjugate component.

[0253] In various embodiments of the invention the oligomeric compound is linked to ligands/conjugates, which may be used, e.g. to increase the cellular uptake of oligomeric compounds. WO2007/031091 provides suitable ligands and conjugates, which are hereby incorporated by reference.

[0254] The invention also provides for a conjugate comprising the compound according to the invention as herein described, and at least one non-nucleotide or non-polynucleotide moiety covalently attached to said compound. Therefore, in various embodiments where the compound of the invention consists of a specified nucleic acid or nucleotide sequence, as herein disclosed, the compound may also comprise at least one non-nucleotide or non-polynucleotide moiety (e.g. not comprising one or more nucleotides or nucleotide analogues) covalently attached to said compound.

[0255] Conjugation (to a conjugate moiety) may enhance the activity, cellular distribution or cellular uptake of the oligomer of the invention. Such moieties include, but are not limited to, antibodies, polypeptides, lipid moieties such as a cholesterol moiety, cholic acid, a thioether, e.g. Hexyl-s-tritylthiol, a thiocholesterol, an aliphatic chain, e.g., dodecandiol or undecyl residues, a phospholipids, e.g., di-hexadecyl-rac-glycerol or triethylammonium 1,2-di-o-hexadecyl-rac-glycero-3-h-phosphonate, a polyamine or a polyethylene glycol chain, an adamantane acetic acid, a palmityl moiety, an octadecylamine or hexylamino-carbonyl-oxycholesterol moiety.

[0256] The oligomers of the invention may also be conjugated to active drug substances, for example, aspirin, ibuprofen, a sulfa drug, an antidiabetic, an antibacterial or an antibiotic.

[0257] In certain embodiments the conjugated moiety is a sterol, such as cholesterol.

[0258] In various embodiments, the conjugated moiety comprises or consists of a positively charged polymer, such as a positively charged peptides of, for example between 1-50, such as 2-20 such as 3-10 amino acid residues in length, and/or polyalkylene oxide such as polyethylglycol(PEG) or polypropylene glycol—see WO 2008/034123, hereby incorporated by reference. Suitably the positively charged polymer, such as a polyalkylene oxide may be attached to the oligomer of the invention via a linker such as the releasable inker described in WO 2008/034123.

[0259] By way of example, the following conjugate moieties may be used in the conjugates of the invention:

[chemical structure]

### Activated Oligomers

[0260] The term “activated oligomer,” as used herein, refers to an oligomer of the invention that is covalently linked (i.e., functionalized) to at least one functional moiety that permits covalent linkage of the oligomer to one or more conjugated moieties, i.e., moieties that are not themselves nucleic acids or monomers, to form the conjugates herein described. Typically, a functional moiety will comprise a chemical group that is capable of covalently bonding to the oligomer via, e.g., a 3′-hydroxyl group or the exocyclic NH₂ group of the adenine base, a spacer that is preferably hydrophilic and a terminal group that is capable of binding to a conjugated moiety (e.g., an amino, sulfhydryl or hydroxyl group). In some embodiments, this terminal group is not protected, e.g., is an NH₂ group. In other embodiments, the terminal group is protected, for example, by any suitable protecting group such as those described in “Protective Groups in Organic Synthesis” by Theodora W Greene and Peter G M Wuts, 3rd edition (John Wiley & Sons, 1999). Examples of suitable hydroxyl protecting groups include esters such as acetate ester, aralkyl groups such as benzyl, diphenylmethyl, or triphenylmethyl, and tetrahydropyranyl. Examples of suitable amino protecting groups include benzyl, alpha-methylbenzyl, diphenylmethyl, triphenylmethyl, benzyloxycarbonyl, tert-butoxycarbonyl, and acyl groups such as trichloroacetyl or trifluoroacetyl. In some embodiments, the functional moiety is self-cleaving. In other embodiments, the functional moiety is biodegradable. See e.g., U.S. Pat. No. 7,087,229, which is incorporated by reference herein in its entirety.

[0261] In some embodiments, oligomers of the invention are functionalized at the 5′ end in order to allow covalent attachment of the conjugated moiety to the 5′ end of the oligomer. In other embodiments, oligomers of the invention can be functionalized at the 3′ end. In still other embodiments, oligomers of the invention can be functionalized along the backbone or on the heterocyclic base moiety. In yet other embodiments, oligomers of the invention can be functionalized at more than one position independently selected from the 5′ end, the 3′ end, the backbone and the base.

[0262] In some embodiments, activated oligomers of the invention are synthesized by incorporating during the synthesis one or more monomers that is covalently attached to a functional moiety. In other embodiments, activated oligomers of the invention are synthesized with monomers that have not been functionalized, and the oligomer is functionalized upon completion of synthesis. In some embodiments, the oligomers are functionalized with a hindered ester containing an aminoalkyl linker, wherein the alkyl portion has the formula (CH₂)_{w}, wherein w is an integer ranging from 1 to 10, preferably about 6, wherein the alkyl portion of the alkylamino group can be straight chain or branched chain, and wherein the functional group is attached to the oligomer via an ester group (—O—C(O)—(CH₂)_{w}NH).

[0263] In other embodiments, the oligomers are functionalized with a hindered ester containing a (CH₂)_{w}-sulfhydryl (SH) linker, wherein w is an integer ranging from 1 to 10, preferably about 6, wherein the alkyl portion of the alkylamino group can be straight chain or branched chain, and wherein the functional group attached to the oligomer via an ester group (—O—C(O)—(CH₂)_{w}SH).

[0264] In some embodiments, sulfhydryl-activated oligonucleotides are conjugated with polymer moieties such as polyethylene glycol or peptides (via formation of a disulfide bond).

[0265] Activated oligomers containing hindered esters as described above can be synthesized by any method known in the art, and in particular by methods disclosed in PCT Publication No. WO 2008/034122 and the examples therein, which is incorporated herein by reference in its entirety.

[0266] In still other embodiments, the oligomers of the invention are functionalized by introducing sulfhydryl, amino or hydroxyl groups into the oligomer by means of a functionalizing reagent substantially as described in U.S. Pat. Nos. 4,962,029 and 4,914,210, i.e., a substantially linear reagent having a phosphoramidite at one end linked through a hydrophilic spacer chain to the opposing end which comprises a protected or unprotected sulfhydryl, amino or hydroxyl group. Such reagents primarily react with hydroxyl groups of the oligomer. In some embodiments, such activated oligomers have a functionalizing reagent coupled to a 5′-hydroxyl group of the oligomer. In other embodiments, the activated oligomers have a functionalizing reagent coupled to a 3′-hydroxyl group. In still other embodiments, the activated oligomers of the invention have a functionalizing reagent coupled to a hydroxyl group on the backbone of the oligomer. In yet further embodiments, the oligomer of the invention is functionalized with more than one of the functionalizing reagents as described in U.S. Pat. Nos. 4,962,029 and 4,914,210, incorporated herein by reference in their entirety. Methods of synthesizing such functionalizing reagents and incorporating them into monomers or oligomers are disclosed in U.S. Pat. Nos. 4,962,029 and 4,914,210.

[0267] In some embodiments, the 5′-terminus of a solid-phase bound oligomer is functionalized with a dienyl phosphoramidite derivative, followed by conjugation of the deprotected oligomer with, e.g., an amino acid or peptide via a Diels-Alder cycloaddition reaction.

[0268] In various embodiments, the incorporation of monomers containing 2′-sugar modifications, such as a 2′-carbamate substituted sugar or a 2′-(O-pentyl-N-phthalimido)-deoxyribose sugar into the oligomer facilitates covalent attachment of conjugated moieties to the sugars of the oligomer. In other embodiments, an oligomer with an amino-containing linker at the 2′-position of one or more monomers is prepared using a reagent such as, for example, 5′-dimethoxytrityl-2′-O-(e-phthalimidylaminopentyl)-2′-deoxyadenosine-3′-N,N-diisopropyl-cyanoethoxy phosphoramidite. See, e.g., Manoharan, et al., Tetrahedron Letters, 1991, 34, 7171.

[0269] In still further embodiments, the oligomers of the invention may have amine-containing functional moieties on the nucleotide, including on the N6 purine amino groups, on the exocyclic N2 of guanine, or on the N4 or 5 positions of cytosine. In various embodiments, such functionalization may be achieved by using a commercial reagent that is already functionalized in the oligomer synthesis.

[0270] Some functional moieties are commercially available, for example, heterobifunctional and homobifunctional linking moieties are available from the Pierce Co. (Rockford, Ill.). Other commercially available linking groups are 5′-Amino-Modifier C6 and 3′-Amino-Modifier reagents, both available from Glen Research Corporation (Sterling, Va.). 5′-Amino-Modifier C6 is also available from ABI (Applied Biosystems Inc., Foster City, Calif.) as Aminolink-2, and 3′-Amino-Modifier is also available from Clontech Laboratories Inc. (Palo Alto, Calif.).

### Therapy and Pharmaceutical Compositions—Formulation and Administration

[0271] As explained initially, the oligonucleotides of the invention will constitute suitable drugs with improved properties. The design of a potent and safe drug requires the fine-tuning of various parameters such as affinity/specificity, stability in biological fluids, cellular uptake, mode of action, pharmacokinetic properties and toxicity.

[0272] Accordingly, in a further aspect the present invention relates to a pharmaceutical composition comprising an oligonucleotide according to the invention and a pharmaceutically acceptable diluent, carrier or adjuvant. Preferably said carrier is saline or buffered saline.

[0273] In a still further aspect the present invention relates to an oligonucleotide according to the present invention for use as a medicament.

[0274] As will be understood, dosing is dependent on severity and responsiveness of the disease state to be treated, and the course of treatment lasting from several days to several months, or until a cure is effected or a diminution of the disease state is achieved. Optimal dosing schedules can be calculated from measurements of drug accumulation in the body of the patient. Optimum dosages may vary depending on the relative potency of individual oligonucleotides. Generally it can be estimated based on EC50s found to be effective in in vitro and in vivo animal models. In general, dosage is from 0.01 μg to 1 g per kg of body weight, and may be given once or more daily, weekly, monthly or yearly, or even once every 2 to 10 years or by continuous infusion for hours up to several months. The repetition rates for dosing can be estimated based on measured residence times and concentrations of the drug in bodily fluids or tissues. Following successful treatment, it may be desirable to have the patient undergo maintenance therapy to prevent the recurrence of the disease state.

[0275] As indicated above, the invention also relates to a pharmaceutical composition, which comprises at least one oligonucleotide of the invention as an active ingredient. It should be understood that the pharmaceutical composition according to the invention optionally comprises a pharmaceutical carrier, and that the pharmaceutical composition optionally comprises further compounds, such as chemotherapeutic compounds, anti-inflammatory compounds, antiviral compounds and/or immuno-modulating compounds.

[0276] The oligonucleotides of the invention can be used “as is” or in form of a variety of pharmaceutically acceptable salts. As used herein, the term “pharmaceutically acceptable salts” refers to salts that retain the desired biological activity of the herein-identified oligonucleotides and exhibit minimal undesired toxicological effects. Non-limiting examples of such salts can be formed with organic amino acid and base addition salts formed with metal cations such as zinc, calcium, bismuth, barium, magnesium, aluminum, copper, cobalt, nickel, cadmium, sodium, potassium, and the like, or with a cation formed from ammonia, N,N-dibenzylethylene-diamine, D-glucosamine, tetraethylammonium, or ethylenediamine.

[0277] In one embodiment of the invention, the oligonucleotide may be in the form of a pro-drug. Oligonucleotides are by virtue negatively charged ions. Due to the lipophilic nature of cell membranes the cellular uptake of oligonucleotides are reduced compared to neutral or lipophilic equivalents. This polarity “hindrance” can be avoided by using the pro-drug approach (see e.g. Crooke, R. M. (1998) in Crooke, S. T. Antisense research and Application. Springer-Verlag, Berlin, Germany, vol. 131, pp. 103-140).

[0278] Pharmaceutically acceptable binding agents and adjuvants may comprise part of the formulated drug.

[0279] Examples of delivery methods for delivery of the therapeutic agents described herein, as well as details of pharmaceutical formulations, salts, may are well described elsewhere for example in U.S. provisional application 60/838,710 and 60/788,995, which are hereby incorporated by reference, and Danish applications, PA 2006 00615 which is also hereby incorporated by reference.

[0280] Pharmaceutical compositions of the present invention include, but are not limited to, solutions, emulsions, and liposome-containing formulations. These compositions may be generated from a variety of components that include, but are not limited to, preformed liquids, self-emulsifying solids and self-emulsifying semisolids. Delivery of drug to tumour tissue may be enhanced by carrier-mediated delivery including, but not limited to, cationic liposomes, cyclodextrins, porphyrin derivatives, branched chain dendrimers, polyethylenimine polymers, nanoparticles and microspheres (Dass C R. J Pharm Pharmacol 2002; 54(1):3-27). The pharmaceutical formulations of the present invention, which may conveniently be presented in unit dosage form, may be prepared according to conventional techniques well known in the pharmaceutical industry. Such techniques include the step of bringing into association the active ingredients with the pharmaceutical carrier(s) or excipient(s). In general the formulations are prepared by uniformly and intimately bringing into association the active ingredients with liquid carriers or finely divided solid carriers or both, and then, if necessary, shaping the product. The compositions of the present invention may be formulated into any of many possible dosage forms such as, but not limited to, tablets, capsules, gel capsules, liquid syrups, soft gels and suppositories. The compositions of the present invention may also be formulated as suspensions in aqueous, non-aqueous or mixed media. Aqueous suspensions may further contain substances which increase the viscosity of the suspension including, for example, sodium carboxymethylcellulose, sorbitol and/or dextran. The suspension may also contain stabilizers. The compounds of the invention may also be conjugated to active drug substances, for example, aspirin, ibuprofen, a sulfa drug, an antidiabetic, an antibacterial or an antibiotic.

[0281] In another embodiment, compositions of the invention may contain one or more oligonucleotide compounds, targeted to a first microRNA and one or more additional oligonucleotide compounds targeted to a second microRNA target. Two or more combined compounds may be used together or sequentially.

[0282] The compounds disclosed herein are useful for a number of therapeutic applications as indicated above. In general, therapeutic methods of the invention include administration of a therapeutically effective amount of an oligonucleotide to a mammal, particularly a human. In a certain embodiment, the present invention provides pharmaceutical compositions containing (a) one or more compounds of the invention, and (b) one or more chemotherapeutic agents. When used with the compounds of the invention, such chemotherapeutic agents may be used individually, sequentially, or in combination with one or more other such chemotherapeutic agents or in combination with radiotherapy. All chemotherapeutic agents known to a person skilled in the art are here incorporated as combination treatments with compound according to the invention. Other active agents, such as anti-inflammatory drugs, including but not limited to nonsteroidal anti-inflammatory drugs and corticosteroids, antiviral drugs, and immuno-modulating drugs may also be combined in compositions of the invention. Two or more combined compounds may be used together or sequentially.

[0283] Examples of therapeutic indications which may be treated by the pharmaceutical compositions of the invention:

| microRNA | Possible medical indications |
|---|---|
| miR-1 | Cardiac arythmia |
| miR-21 | Glioblastoma, breast cancer, hepatocellular |
| | carcinoma, colorectal cancer, sensitization |
| | of gliomas to cytotoxic drugs, cardiac |
| | hypertrophy |
| miR-21, miR-200b | Response to chemotherapy and regulation of |
| and miR-141 | cholangiocarcinoma growth |
| miR-122 | hypercholesterolemia, hepatitis C infection, |
| | hemochromatosis |
| miR-19b | lymphoma and other tumour types |
| miR-26a | Osteoblast differentiation of human stem |
| | cells |
| miR-155 | lymphoma, pancreatic tumor development, |
| | breast and lung cancer |
| miR-203 | Psoriasis |
| miR-375 | diabetes, metabolic disorders, glucose- |
| | induced insulin secretion from pancreatic |
| | endocrine cells |
| miR-181 | myoblast differentiation, auto immune |
| | disorders |
| miR-10b | Breast cancer cell invasion and metastasis |
| miR-125b-1 | Breast, lung, ovarian and cervical cancer |
| miR-221 and 222 | Prostate carcinoma, human thyroid papillary |
| | car, human hepatocellular carcinoma |
| miRNA-372 and -373 | testicular germ cell tumors. |
| miR-142 | B-cell leukemia |
| miR-17-19b | B-cell lymphomas, lung cancer, hepatocellular |
| cluster | carcinoma |

[0284] Tumor suppressor gene tropomysin 1 (TPM1) mRNA has been indicated as a target of miR-21. Myotrophin (mtpn) mRNA has been indicated as a target of miR 375.

[0285] In an even further aspect, the present invention relates to the use of an oligonucleotide according to the invention for the manufacture of a medicament for the treatment of a disease selected from the group consisting of: atherosclerosis, hypercholesterolemia and hyperlipidemia; cancer, glioblastoma, breast cancer, lymphoma, lung cancer; diabetes, metabolic disorders; myoblast differentiation; immune disorders.

[0286] The invention further refers to oligonucleotides according to the invention for the use in the treatment of from a disease selected from the group consisting of: atherosclerosis, hypercholesterolemia and hyperlipidemia; cancer, glioblastoma, breast cancer, lymphoma, lung cancer; diabetes, metabolic disorders; myoblast differentiation; immune disorders.

[0287] The invention provides for a method of treating a subject suffering from a disease or condition selected from the group consisting of: atherosclerosis, hypercholesterolemia and hyperlipidemia; cancer, glioblastoma, breast cancer, lymphoma, lung cancer; diabetes, metabolic disorders; myoblast differentiation; immune disorders, the method comprising the step of administering an oligonucleotide or pharmaceutical composition of the invention to the subject in need thereof.

[0288] The invention further provides for a kit comprising a pharmaceutical composition according to the invention, and a second independent active ingredient that is an inhibitor of the VLDL assembly pathway, such as an ApoB inhibitor, or an MTP inhibitor.

### Cancer

[0289] In an even further aspect, the present invention relates to the use of an oligonucleotide according to the invention for the manufacture of a medicament for the treatment of cancer. In another aspect, the present invention concerns a method for treatment of, or prophylaxis against, cancer, said method comprising administering an oligonucleotide of the invention or a pharmaceutical composition of the invention to a patient in need thereof.

[0290] Such cancers may include lymphoreticular neoplasia, lymphoblastic leukemia, brain tumors, gastric tumors, plasmacytomas, multiple myeloma, leukemia, connective tissue tumors, lymphomas, and solid tumors.

[0291] In the use of a compound of the invention for the manufacture of a medicament for the treatment of cancer, said cancer may suitably be in the form of a solid tumor. Analogously, in the method for treating cancer disclosed herein said cancer may suitably be in the form of a solid tumor.

[0292] Furthermore, said cancer is also suitably a carcinoma. The carcinoma is typically selected from the group consisting of malignant melanoma, basal cell carcinoma, ovarian carcinoma, breast carcinoma, non-small cell lung cancer, renal cell carcinoma, bladder carcinoma, recurrent superficial bladder cancer, stomach carcinoma, prostatic carcinoma, pancreatic carcinoma, lung carcinoma, cervical carcinoma, cervical dysplasia, laryngeal papillomatosis, colon carcinoma, colorectal carcinoma and carcinoid tumors. More typically, said carcinoma is selected from the group consisting of malignant melanoma, non-small cell lung cancer, breast carcinoma, colon carcinoma and renal cell carcinoma. The malignant melanoma is typically selected from the group consisting of superficial spreading melanoma, nodular melanoma, lentigo maligna melanoma, acral melagnoma, amelanotic melanoma and desmoplastic melanoma.

[0293] Alternatively, the cancer may suitably be a sarcoma. The sarcoma is typically in the form selected from the group consisting of osteosarcoma, Ewing's sarcoma, chondrosarcoma, malignant fibrous histiocytoma, fibrosarcoma and Kaposi's sarcoma.

[0294] Alternatively, the cancer may suitably be a glioma.

[0295] A further embodiment is directed to the use of an oligonucleotide according to the invention for the manufacture of a medicament for the treatment of cancer, wherein said medicament further comprises a chemotherapeutic agent selected from the group consisting of adrenocorticosteroids, such as prednisone, dexamethasone or decadron; altretamine (hexylen, hexamethylmelamine (HMM)); amifostine (ethyol); aminoglutethimide (cytadren); amsacrine (M-AMSA); anastrozole (arimidex); androgens, such as testosterone; asparaginase (elspar); bacillus calmette-gurin; bicalutamide (casodex); bleomycin (blenoxane); busulfan (myleran); carboplatin (paraplatin); carmustine (BCNU, BiCNU); chlorambucil (leukeran); chlorodeoxyadenosine (2-CDA, cladribine, leustatin); cisplatin (platinol); cytosine arabinoside (cytarabine); dacarbazine (DTIC); dactinomycin (actinomycin-D, cosmegen); daunorubicin (cerubidine); docetaxel (taxotere); doxorubicin (adriomycin); epirubicin; estramustine (emcyt); estrogens, such as diethylstilbestrol (DES); etopside (VP-16, VePesid, etopophos); fludarabine (fludara); flutamide (eulexin); 5-FUDR (floxuridine); 5-fluorouracil (5-FU); gemcitabine (gemzar); goserelin (zodalex); herceptin (trastuzumab); hydroxyurea (hydrea); idarubicin (idamycin); ifosfamide; IL-2 (proleukin, aldesleukin); interferon alpha (intron A, roferon A); irinotecan (camptosar); leuprolide (lupron); levamisole (ergamisole); lomustine (CCNU); mechlorathamine (mustargen, nitrogen mustard); melphalan (alkeran); mercaptopurine (purinethol, 6-MP); methotrexate (mexate); mitomycin-C (mutamucin); mitoxantrone (novantrone); octreotide (sandostatin); pentostatin (2-deoxycoformycin, nipent); plicamycin (mithramycin, mithracin); prorocarbazine (matulane); streptozocin; tamoxifin (nolvadex); taxol (paclitaxel); teniposide (vumon, VM-26); thiotepa; topotecan (hycamtin); tretinoin (vesanoid, all-trans retinoic acid); vinblastine (valban); vincristine (oncovin) and vinorelbine (navelbine). Suitably, the further chemotherapeutic agent is selected from taxanes such as Taxol, Paclitaxel or Docetaxel.

[0296] Similarly, the invention is further directed to the use of an oligonucleotide according to the invention for the manufacture of a medicament for the treatment of cancer, wherein said treatment further comprises the administration of a further chemotherapeutic agent selected from the group consisting of adrenocorticosteroids, such as prednisone, dexamethasone or decadron; altretamine (hexylen, hexamethylmelamine (HMM)); amifostine (ethyol); aminoglutethimide (cytadren); amsacrine (M-AMSA); anastrozole (arimidex); androgens, such as testosterone; asparaginase (elspar); bacillus calmette-gurin; bicalutamide (casodex); bleomycin (blenoxane); busulfan (myleran); carboplatin (paraplatin); carmustine (BCNU, BiCNU); chlorambucil (leukeran); chlorodeoxyadenosine (2-CDA, cladribine, leustatin); cisplatin (platinol); cytosine arabinoside (cytarabine); dacarbazine (DTIC); dactinomycin (actinomycin-D, cosmegen); daunorubicin (cerubidine); docetaxel (taxotere); doxorubicin (adriomycin); epirubicin; estramustine (emcyt); estrogens, such as diethylstilbestrol (DES); etopside (VP-16, VePesid, etopophos); fludarabine (fludara); flutamide (eulexin); 5-FUDR (floxuridine); 5-fluorouracil (5-FU); gemcitabine (gemzar); goserelin (zodalex); herceptin (trastuzumab); hydroxyurea (hydrea); idarubicin (idamycin); ifosfamide; IL-2 (proleukin, aldesleukin); interferon alpha (intron A, roferon A); irinotecan (camptosar); leuprolide (lupron); levamisole (ergamisole); lomustine (CCNU); mechlorathamine (mustargen, nitrogen mustard); melphalan (alkeran); mercaptopurine (purinethol, 6-MP); methotrexate (mexate); mitomycin-C (mutamucin); mitoxantrone (novantrone); octreotide (sandostatin); pentostatin (2-deoxycoformycin, nipent); plicamycin (mithramycin, mithracin); prorocarbazine (matulane); streptozocin; tamoxifin (nolvadex); taxol (paclitaxel); teniposide (vumon, VM-26); thiotepa; topotecan (hycamtin); tretinoin (vesanoid, all-trans retinoic acid); vinblastine (valban); vincristine (oncovin) and vinorelbine (navelbine). Suitably, said treatment further comprises the administration of a further chemotherapeutic agent selected from taxanes, such as Taxol, Paclitaxel or Docetaxel.

[0297] Alternatively stated, the invention is furthermore directed to a method for treating cancer, said method comprising administering an oligonucleotide of the invention or a pharmaceutical composition according to the invention to a patient in need thereof and further comprising the administration of a further chemotherapeutic agent. Said further administration may be such that the further chemotherapeutic agent is conjugated to the compound of the invention, is present in the pharmaceutical composition, or is administered in a separate formulation.

### Infectious Diseases

[0298] It is contemplated that the compounds of the invention may be broadly applicable to a broad range of infectious diseases, such as diphtheria, tetanus, pertussis, polio, hepatitis B, hepatitis C, hemophilus influenza, measles, mumps, and rubella.

[0299] Hsa-miR122 is indicated in hepatitis C infection and as such oligonucleotides according to the invention which target miR-122 may be used to treat Hepatitus C infection.

[0300] Accordingly, in yet another aspect the present invention relates the use of an oligonucleotide according to the invention for the manufacture of a medicament for the treatment of an infectious disease, as well as to a method for treating an infectious disease, said method comprising administering an oligonucleotide according to the invention or a pharmaceutical composition according to the invention to a patient in need thereof.

[0301] In a preferred embodiment, the invention provides for a combination treatment providing an anti miR-122 oligomer in combination with an inhibitor of VLDL assembly, such as an inhibitor of apoB, or of MTP.

### Inflammatory Diseases

[0302] The inflammatory response is an essential mechanism of defense of the organism against the attack of infectious agents, and it is also implicated in the pathogenesis of many acute and chronic diseases, including autoimmune disorders. In spite of being needed to fight pathogens, the effects of an inflammatory burst can be devastating. It is therefore often necessary to restrict the symptomatology of inflammation with the use of anti-inflammatory drugs. Inflammation is a complex process normally triggered by tissue injury that includes activation of a large array of enzymes, the increase in vascular permeability and extravasation of blood fluids, cell migration and release of chemical mediators, all aimed to both destroy and repair the injured tissue.

[0303] In yet another aspect, the present invention relates to the use of an oligonucleotide according to the invention for the manufacture of a medicament for the treatment of an inflammatory disease, as well as to a method for treating an inflammatory disease, said method comprising administering an oligonucleotide according to the invention or a pharmaceutical composition according to the invention to a patient in need thereof.

[0304] In one preferred embodiment of the invention, the inflammatory disease is a rheumatic disease and/or a connective tissue diseases, such as rheumatoid arthritis, systemic lupus erythematous (SLE) or Lupus, scleroderma, polymyositis, inflammatory bowel disease, dermatomyositis, ulcerative colitis, Crohn's disease, vasculitis, psoriatic arthritis, exfoliative psoriatic dermatitis, pemphigus vulgaris and Sjorgren's syndrome, in particular inflammatory bowel disease and Crohn's disease.

[0305] Alternatively, the inflammatory disease may be a non-rheumatic inflammation, like bursitis, synovitis, capsulitis, tendinitis and/or other inflammatory lesions of traumatic and/or sportive origin.

### Metabolic Diseases

[0306] A metabolic disease is a disorder caused by the accumulation of chemicals produced naturally in the body. These diseases are usually serious, some even life threatening. Others may slow physical development or cause mental retardation. Most infants with these disorders, at first, show no obvious signs of disease. Proper screening at birth can often discover these problems. With early diagnosis and treatment, metabolic diseases can often be managed effectively.

[0307] In yet another aspect, the present invention relates to the use of an oligonucleotide according to the invention or a conjugate thereof for the manufacture of a medicament for the treatment of a metabolic disease, as well as to a method for treating a metabolic disease, said method comprising administering an oligonucleotide according to the invention or a conjugate thereof, or a pharmaceutical composition according to the invention to a patient in need thereof.

[0308] In one preferred embodiment of the invention, the metabolic disease is selected from the group consisting of Amyloidosis, Biotimidase, OMIM (Online Mendelian Inheritance in Man), Crigler Najjar Syndrome, Diabetes, Fabry Support & Information Group, Fatty acid Oxidation Disorders, Galactosemia, Glucose-6-Phosphate Dehydrogenase (G6PD) deficiency, Glutaric aciduria, International Organization of Glutaric Acidemia, Glutaric Acidemia Type I, Glutaric Acidemia, Type II, Glutaric Acidemia Type I, Glutaric Acidemia Type-II, F-HYPDRR-Familial Hypophosphatemia, Vitamin D Resistant Rickets, Krabbe Disease, Long chain 3 hydroxyacyl CoA dehydrogenase deficiency (LCHAD), Mannosidosis Group, Maple Syrup Urine Disease, Mitochondrial disorders, Mucopolysaccharidosis Syndromes: Niemann Pick, Organic acidemias, PKU, Pompe disease, Porphyria, Metabolic Syndrome, Hyperlipidemia and inherited lipid disorders, Trimethylaminuria: the fish malodor syndrome, and Urea cycle disorders.

### Liver Disorders

[0309] In yet another aspect, the present invention relates to the use of an oligonucleotide according to the invention or a conjugate thereof for the manufacture of a medicament for the treatment of a liver disorder, as well as to a method for treating a liver disorder, said method comprising administering an oligonucleotide according to the invention or a conjugate thereof, or a pharmaceutical composition according to the invention to a patient in need thereof.

[0310] In one preferred embodiment of the invention, the liver disorder is selected from the group consisting of Biliary Atresia, Alagille Syndrome, Alpha-1 Antitrypsin, Tyrosinemia, Neonatal Hepatitis, and Wilson Disease.

### Other Uses

[0311] The oligonucleotides of the present invention can be utilized for as research reagents for diagnostics, therapeutics and prophylaxis. In research, the oligonucleotide may be used to specifically inhibit the synthesis of target genes in cells and experimental animals thereby facilitating functional analysis of the target or an appraisal of its usefulness as a target for therapeutic intervention. In diagnostics the oligonucleotides may be used to detect and quantitate target expression in cell and tissues by Northern blotting, in-situ hybridisation or similar techniques. For therapeutics, an animal or a human, suspected of having a disease or disorder, which can be treated by modulating the expression of target is treated by administering the oligonucleotide compounds in accordance with this invention. Further provided are methods of treating an animal particular mouse and rat and treating a human, suspected of having or being prone to a disease or condition, associated with expression of target by administering a therapeutically or prophylactically effective amount of one or more of the oligonucleotide compounds or compositions of the invention.

Therapeutic Use of Oligonucleotides Targeting miR-122a

[0312] We have demonstrated that a LNA-antimiR, targeting miR-122a reduces plasma cholesterol levels. Therefore, another aspect of the invention is use of the above described oligonucleotides targeting miR-122a as medicine.

[0313] Still another aspect of the invention is use of the above described oligonucleotides targeting miR-122a for the preparation of a medicament for treatment of increased plasma cholesterol levels (or hypercholesterolemia and related disorders). The skilled man will appreciate that increased plasma cholesterol levels is undesirable as it increases the risk of various conditions, e.g. atherosclerosis.

[0314] Still another aspect of the invention is use of the above described oligonucleotides targeting miR-122a for upregulating the mRNA levels of Nrdg3, Aldo A, Bckdk or CD320.

### EMBODIMENTS

[0315] The following embodiments of the present invention may be used in combination with the other embodiments described herein.

1. A pharmaceutical composition comprising an oligomer of between 6-12 nucleotides in length, wherein said oligomer comprises a contiguous nucleotide sequence of a total of between 6-12 nucleotides, such as 6, 7, 8, 9, 10, 11 or 12 nucleotide units, wherein at least 50% of the nucleobase units of the oligomer are high affinity nucleotide analogue units, and a pharmaceutically acceptable diluent, carrier, salt or adjuvant.
2. The pharmaceutical composition according to embodiment 1, wherein the contiguous nucleotide sequence is complementary to a corresponding region of a mammalian, human or viral microRNA (miRNA) sequence.
3. The pharmaceutical composition according to embodiment 2, wherein the contiguous nucleotide sequence is complementary to a corresponding region of a miRNA sequence selected from the group of miRNAs listed in any one of tables 3, 4 or 5.
4. The pharmaceutical composition according to embodiment 2 or 3, wherein the contiguous nucleotide sequence consists of or comprises a sequence which is complementary to the seed sequence of said microRNA.
5. The pharmaceutical composition according to any one of embodiments 2-4, wherein the contiguous nucleotide sequence consists of or comprises a sequence selected from any one of the sequences listed in table 3 or 4.
6. The pharmaceutical composition according to embodiment 4 or 5, wherein the 3′ nucleobase of the seedmer forms the 3′ most nucleobase of the contiguous nucleotide sequence, wherein the contiguous nucleotide sequence may, optionally, comprise one or two further 5′ nucleobases.
7. The pharmaceutical composition according to any one of embodiments 1-6, wherein said contiguous nucleotide sequence does not comprise a nucleotide which corresponds to the first nucleotide present in the micro RNA sequence counted from the 5′ end.
8. The pharmaceutical composition according to any one of embodiments 1-7, wherein the contiguous nucleotide sequence is complementary to a corresponding nucleotide sequence present in a miRNA selected from those shown in table 3 or 4 or 5.
9. The pharmaceutical composition according to embodiment 8, wherein said miRNA is selected from the group consisting of miR-1, miR-10b, miR-17-3p, miR-18, miR-19a, miR-19b, miR-20, miR-21, miR-34a, miR-93, miR-106a, miR-106b, miR-122, miR-133, miR-134, miR-138, miR-155, miR-192, miR-194, miR-221, miR-222, and miR-375.
10. The pharmaceutical composition according to any one of embodiments 1-9, wherein at least 60%, 65%, 70%, 75%, 80%, 85%, 90%, 95% or all of the nucleobase units of the contiguous nucleotide sequence are nucleotide analogue units.
11. The pharmaceutical composition according to embodiment 10, wherein the nucleotide analogue units are selected from the group consisting of 2′-O_alkyl-RNA unit, 2′-OMe-RNA unit, 2′-amino-DNA unit, 2′-fluoro-DNA unit, LNA unit, PNA unit, HNA unit, INA unit, and a 2′MOE RNA unit.
12. The pharmaceutical composition according to embodiment 10 or 11, wherein at least 60%, 65%, 70%, 75%, 80%, 85%, 90%, 95% or all of the nucleobase units of the contiguous nucleotide sequence are Locked Nucleic Acid (LNA) nucleobase units.
13. The pharmaceutical composition according to embodiment 12, wherein all of the nucleobase units of the contiguous nucleotide sequence are LNA nucleobase units.
14. The pharmaceutical composition according to any one of embodiments 1-13, wherein the contiguous nucleotide sequence comprises or consists of 7, 8, 9 or 10, preferably contiguous, LNA nucleobase units.
15. The pharmaceutical composition according to any one of embodiments 1-14, wherein the oligomer consist of 7, 8, 9 or 10 contiguous nucleobase units and wherein at least 7 nucleobase units are nucleotide analogue units.
16. The pharmaceutical composition according to embodiment 15, wherein the nucleotide analogue units are Locked Nucleic Acid (LNA) nucleobase units.
17. The pharmaceutical composition according to embodiment 15, wherein the nucleotide analogue units in the molecule consists of a mixture of at least 50% LNA units and up to 50% other nucleotide analogue units.
18. The pharmaceutical composition according to any one of embodiments 1-17, wherein at least 75%, such as 80% or 85% or 90% or 95% or all of the internucleoside linkages present between the nucleobase units of the contiguous nucleotide sequence are phosphorothioate internucleoside linkages.
19. The pharmaceutical composition according to any one of embodiments 1-18, wherein said oligomer is conjugated with one or more non-nucleobase compounds.
20. The pharmaceutical composition according to any one of embodiments 1-19, wherein the contiguous nucleotide sequence is complementary to the corresponding sequence of at least two miRNA sequences such as 2, 3, 4, 5, 6, 7, 8, 9, or 10 miRNA sequences.
21. The pharmaceutical composition according to any one of embodiments 1-20, wherein the contiguous nucleotide sequence consists or comprises of a sequence which is complementary to the sequence of at least two miRNA seed region sequences such as 2, 3, 4, 5, 6, 7, 8, 9, or 10 miRNA seed region sequences.
22. The pharmaceutical composition according to any one of embodiments 20 or 21, wherein the contiguous nucleotide sequence is complementary to the corresponding region of both miR-221 and miR-222.
23. The pharmaceutical composition according to embodiment 22, wherein the contiguous nucleotide sequence consists or comprises of a sequence that is complementary to 5′GCUACAU3′.
24. The pharmaceutical composition according to any one of embodiments 1-23, wherein the oligomer is constituted as a prodrug.
25. The pharmaceutical composition according to any one of embodiments 1-24, wherein the contiguous nucleotide sequence is complementary to a corresponding region of has-miR-122.
26. The pharmaceutical composition according to embodiment 25, for use in the treatment of a medical disorder or disease selected from the group consisting of: hepatitis C virus infection and hypercholesterolemia and related disorders.
27. The pharmaceutical composition according to embodiment 25 or 26, wherein the composition further comprises a second independent active ingredient that is an inhibitor of the VLDL assembly pathway, such as an ApoB inhibitor, or an MTP inhibitor.
28. A kit comprising a pharmaceutical composition according to embodiment 25 or 26, and a second independent active ingredient that is an inhibitor of the VLDL assembly pathway, such as an ApoB inhibitor, or an MTP inhibitor.
29. A method for the treatment of a disease or medical disorder associated with the presence or overexpression of a microRNA, comprising the step of administering a the pharmaceutical composition) according to any one of embodiments 1-28 to a patient who is suffering from, or is likely to suffer from said disease or medical disorder.
30. An oligomer, as defined according to anyone of embodiments 1-25.
31. A conjugate comprising the oligomer according to embodiment 30, and at least one non-nucleobase compounds.
32. The use of an oligomer or a conjugate as defined in any one of embodiments 30-31, for the manufacture of a medicament for the treatment of a disease or medical disorder associated with the presence or over-expression of the microRNA.
33. A method for reducing the amount, or effective amount, of a miRNA in a cell, comprising administering an oligomer, a conjugate or a pharmaceutical composition, according to any one of the preceeding embodiments to the cell which is expressing said miRNA so as to reduce the amount, or effective amount of the miRNA in the cell.
34. A method for de-repression of a mRNA whose expression is repressed by a miRNA in a cell comprising administering an oligomer, a conjugate or a pharmaceutical composition, according to any one of the preceeding embodiments to the cell to the cell which expressed both said mRNA and said miRNA, in order to de-repress the expression of the mRNA. References: Details of the reference are provided in the priority documents.

### EXAMPLES

[0316] LNA Monomer and oligonucleotide synthesis were performed using the methodology referred to in Examples 1 and 2 of WO2007/112754. The stability of LNA oligonucletides in human or rat plasma is performed using the methodology referred to in Example 4 of WO2007/112754. The treatment of in vitro cells with LNA anti-miR antisense oligonucleotide (targeting miR-122) is performed using the methodology referred to in Example 6 of WO2007/112754. The analysis of Oligonucleotide Inhibition of miR expression by microRNA specific quantitative PCR in both an in vitro and in vivo model is performed using the methodology referred to in Example 7 of WO2007/112754. The assessment of LNA antimir knock-down specificity using miRNA microarray expression profiling is performed using the methodology referred to in Example 8 of WO2007/112754. The detection of microRNAs by in situ hybridization is performed using the methodology referred to in Example 9 of WO2007/112754. The Isolation and analysis of mRNA expression (total RNA isolation and cDNA synthesis for mRNA analysis) in both an in vitro and in vivo model is performed using the methodology referred to in Example 10 of WO2007/112754. In vivo Experiments using Oligomers of the invention targeting microRNA-122. and subsequent analysis are performed using the methods disclosed in Examples 11-27 of WO2007/112754. The above mentioned examples of WO2007/112754 are hereby specifically incorporated by reference.

### Example 1

### Design of the LNA AntimiR Oligonucleotides and Melting Temperatures

TABLE 2

Oligomers used in the examples and figures. The SEQ# is an
identifier used throughout the examples and figures - the
SEQ ID NO which is used in the sequence listing is also provided.

| | | | |
|---|---|---|---|
| Example/FIG. | SEQ ID | | |
| SEQ # | NO | Compound Sequence | Comment |

| | | | |
|---|---|---|---|
| #3204 | 1 | TcAGtCTGaTaAgCT | |
| #3205 | 2 | GATAAGCT | |
| #3206 | 3 | TcAcAATtaGCAtTA | |
| #3207 | 4 | TAGCATTA | |
| #4 | 5 | CcAttGTcaCaCtCC | |
| #3208 | 6 | CACACTCC | |
| #3209 | 7 | TAAGCT | |
| #3210 | 8 | ATAAGCT | |
| #3211 | 9 | TGATAAGCT | |
| #3212 | 10 | CTGATAAGCT | |
| #3213 | 11 | GTCTGATAAGCT | |
| #2114 | 12 | CAGTCTGATAAGCT | |
| #3215 | 13 | TCTGATAA | |
| #3216 | 14 | ATCAGTCT | |
| #3217 | 15 | TCAACATC | |
| #3218/#3230 | 16 | GGTAAACT | Underline = mismatch |
| #3219 | 17 | CGTAATGA | Underline = mismatch |
| #3220 | 18 | TCAgtctgataaGCTa | 5′ fluorescent label (FAM) |
| #3221 | 19 | AGCACTTT | |
| #3222 | 20 | ATTTGCAC | |
| #3223 | 21 | AgCagACaaTgTaGC | 5′ fluorescent label (FAM) |
| #3224 | 22 | GtAgcCAgaTgTaGC | 5′ fluorescent label (FAM) |
| #3225 | 23 | ATGTAGC | |
| #3226 | 24 | ACaAcCTacTaCcTC | |
| #3227 | 25 | ACTACCTC | |
| #3228 | 26 | CaCtgTCagCaCtTT | |
| #3229 | 27 | TgCatAGatTtGcAC | |
| #3231 | 28 | GTAGACT | |
| #3232 | 29 | TACCTC | |
| #3233 | 30 | CTACCTC | |
| #3234 | 31 | TNCTACCTC | N = universal base. |
| #3235 | 32 | TNCTACCTC | N = universal base. |
| #3236 | 33 | GCaAcCTacTaCcTC | |
| #3237 | 34 | ACaAcCTccTaCcTC | |
| #3238 | 35 | ACaAaCTacTaCcTC | |
| #3239 | 36 | CTACCTC | |
| #3240 | 37 | CTAACTC | |
| #3241 | 38 | TTAGCATTA | |
| #3242 | 39 | CGATTAGCATTA | |
| #3243 | 977 | CACGATTAGCATTA | |
| #3244 | 978 | GCATTA | |
| #3245 | 979 | AGCATTA | |
| #3246 | 980 | ATTAGCATTA | |

Capital and lower case letters denote LNA and DNA, respectively.
LNA cytosines are preferably methyl cytosine/5'methyl-cytosine*
All internucleoside linkages are preferably phosphorothioate*
All LNA may, for example, be beta-D-oxy LNA*
*Used in the specific examples.

### Example 2

### In Vitro Model: Cell Culture

[0318] The effect of LNA oligonucleotides on target nucleic acid expression (amount) can be tested in any of a variety of cell types provided that the target nucleic acid is present at measurable levels. Target can be expressed endogenously or by transient or stable transfection of a nucleic acid encoding said nucleic acid.

[0319] The expression level of target nucleic acid can be routinely determined using, for example, Northern blot analysis (including microRNA northern), Quantitative PCR (including microRNA qPCR), Ribonuclease protection assays. The following cell types are provided for illustrative purposes, but other cell types can be routinely used, provided that the target is expressed in the cell type chosen.

[0320] Cells were cultured in the appropriate medium as described below and maintained at 37° C. at 95-98% humidity and 5% CO₂. Cells were routinely passaged 2-3 times weekly.

[0321] 15PC3: The human prostate cancer cell line 15PC3 was kindly donated by Dr. F. Baas, Neurozintuigen Laboratory, AMC, The Netherlands and was cultured in DMEM (Sigma)+10% fetal bovine serum (FBS)+Glutamax I+gentamicin.

[0322] PC3: The human prostate cancer cell line PC3 was purchased from ATCC and was cultured in F12 Coon's with glutamine (Gibco)+10% FBS+gentamicin.

[0323] 518A2: The human melanoma cancer cell line 518A2 was kindly donated by Dr. B. Jansen, Section of experimental Oncology, Molecular Pharmacology, Department of Clinical Pharmacology, University of Vienna and was cultured in DMEM (Sigma)+10% fetal bovine serum (FBS)+Glutamax I+gentamicin.

[0324] HeLa: The cervical carcinoma cell line HeLa was cultured in MEM (Sigma) containing 10% fetal bovine serum gentamicin at 37° C., 95% humidity and 5% CO₂.

[0325] MPC-11: The murine multiple myeloma cell line MPC-11 was purchased from ATCC and maintained in DMEM with 4 mM Glutamax+10% Horse Serum.

[0326] DU-145: The human prostate cancer cell line DU-145 was purchased from ATCC and maintained in RPMI with Glutamax+10% FBS.

[0327] RCC-4+/−VHL: The human renal cancer cell line RCC4 stably transfected with plasmid expressing VHL or empty plasmid was purchased from ECACC and maintained according to manufacturers instructions.

[0328] 786-0: The human renal cell carcinoma cell line 786-0 was purchased from ATCC and maintained according to manufacturers instructions

[0329] HUVEC: The human umbilical vein endothelial cell line HUVEC was purchased from Camcrex and maintained in EGM-2 medium.

[0330] K562: The human chronic myelogenous leukaemia cell line K562 was purchased from ECACC and maintained in RPMI with Glutamax+10% FBS. U87MG: The human glioblastoma cell line U87MG was purchased from ATCC and maintained according to the manufacturers instructions.

[0331] B16: The murine melanoma cell line B16 was purchased from ATCC and maintained according to the manufacturers instructions.

[0332] LNCap: The human prostate cancer cell line LNCap was purchased from ATCC and maintained in RPMI with Glutamax+10% FBS

[0333] Huh-7: Human liver, epithelial like cultivated in Eagles MEM with 10% FBS, 2 mM Glutamax I, 1× non-essential amino acids, Gentamicin 25 μg/ml

[0334] L428: (Deutsche Sammlung für Mikroorganismen (DSM, Braunschwieg, Germany)): Human B cell lymphoma maintained in RPMI 1640 supplemented with 10% FCS, L-glutamine and antibiotics.

[0335] L1236: (Deutsche Sammlung für Mikroorganismen (DSM, Braunschwieg, Germany)): Human B cell lymphoma maintained in RPMI 1640 supplemented with 10% FCS, L-glutamine and antibiotics.

### Example 3

### Design of a LNA AntimiR Library for all Human MicroRNA Sequences in miRBase microRNA Database

[0336] The miRBase version used was version 12, as reported in Griffiths-Jones, S., Grocock, R. J., van Dongen, S., Bateman, A., Enright, A. J. 2006. miRBase: microRNA sequences, targets and gene nomenclature. Nucleic Acids Res. 34: D140-4, and available via http://microrna.sanger.ac.uk/sequences/index.shtml.

[0337] Table 1 shows 7, 8 and 9mer nucleotide sequences comprising the seedmer sequence of micro RNA's according to the miRBase micro RNA database. The seedmer sequence comprises the reverse complement of the microRNA seed region. In some embodiments the oligomer of the invention has a contiguous nucleotide sequence selected from the 7mer, 8mer or 9mer sequences. With respect to the 7mer, 8mer and 9mer sequences, in some embodiments, all the internucleoside linkages are phosphorothioate. The 7mer, 8mer and 9mer nucleotide sequences may consist of sequence of nucleotide analogues as described herein, such as LNA nucleotide analogues. LNA cytosines may be methyl-cytosine (5′ methyl-cytosine). In some embodiments, the LNA is beta-D-oxy-LNA.

[0338] Table 3 provides a list of microRNAs grouped into those which can be targeted by the same seedmer oligomers, such as the 7, 8 or 9mers provided herein (see table 1).

TABLE 3
hsa-let-7a*, hsa-let-7f-1*
hsa-let-7a, hsa-let-7b, hsa-let-7c, hsa-let-7d, hsa-let-7f, hsa-miR-98,
hsa-let-7g, hsa-let-7i
hsa-miR-1, hsa-miR-206
hsa-miR-103, hsa-miR-107
hsa-miR-10a, hsa-miR-10b
hsa-miR-125b, hsa-miR-125a-5p
hsa-miR-129*, hsa-miR-129-3p
hsa-miR-130a, hsa-miR-301a, hsa-miR-130b, hsa-miR-454, hsa-miR-301b
hsa-miR-133a, hsa-miR-133b
hsa-miR-135a, hsa-miR-135b
hsa-miR-141, hsa-miR-200a
hsa-miR-146a, hsa-miR-146b-5p
hsa-miR-152, hsa-miR-148b
hsa-miR-154*, hsa-miR-487a
hsa-miR-15a, hsa-miR-16, hsa-miR-15b, hsa-miR-195, hsa-miR-497
hsa-miR-17, hsa-miR-20a, hsa-miR-93, hsa-miR-106a, hsa-miR-106b,
hsa-miR-20b, hsa-miR-526b*
hsa-miR-181a, hsa-miR-181c
hsa-miR-181b, hsa-miR-181d
hsa-miR-18a, hsa-miR-18b
hsa-miR-190, hsa-miR-190b
hsa-miR-192, hsa-miR-215
hsa-miR-196a, hsa-miR-196b
hsa-miR-199a-3p, hsa-miR-199b-3p
hsa-miR-199a-5p, hsa-miR-199b-5p
hsa-miR-19a*, hsa-miR-19b-1*, hsa-miR-19b-2*
hsa-miR-19a, hsa-miR-19b
hsa-miR-200b, hsa-miR-200c
hsa-miR-204, hsa-miR-211
hsa-miR-208a, hsa-miR-208b
hsa-miR-212, hsa-miR-132
hsa-miR-23a*, hsa-miR-23b*
hsa-miR-23a, hsa-miR-23b, hsa-miR-130a*
hsa-miR-24-1*, hsa-miR-24-2*
hsa-miR-25, hsa-miR-92a, hsa-miR-367, hsa-miR-92b
hsa-miR-26a, hsa-miR-26b
hsa-miR-26a-1*, hsa-miR-26a-2*
hsa-miR-27a, hsa-miR-27b
hsa-miR-29a, hsa-miR-29b, hsa-miR-29c
hsa-miR-302a, hsa-miR-302b, hsa-miR-302c, hsa-miR-302d,
hsa-miR-373, hsa-miR-520e, hsa-miR-520a-3p, hsa-miR-520b,
hsa-miR-520c-3p, hsa-miR-520d-3p
hsa-miR-302b*, hsa-miR-302d*
hsa-miR-30a*, hsa-miR-30d*, hsa-miR-30e*
hsa-miR-30a, hsa-miR-30c, hsa-miR-30d, hsa-miR-30b, hsa-miR-30e
hsa-miR-330-5p, hsa-miR-326
hsa-miR-34a, hsa-miR-34c-5p, hsa-miR-449a, hsa-miR-449b
hsa-miR-362-3p, hsa-miR-329
hsa-miR-374a, hsa-miR-374b
hsa-miR-376a, hsa-miR-376b
hsa-miR-378, hsa-miR-422a
hsa-miR-379*, hsa-miR-411*
hsa-miR-381, hsa-miR-300
hsa-miR-509-5p, hsa-miR-509-3-5p
hsa-miR-515-5p, hsa-miR-519e*
hsa-miR-516b*, hsa-miR-516a-3p
hsa-miR-517a, hsa-miR-517c
hsa-miR-518a-5p, hsa-miR-527
hsa-miR-518f, hsa-miR-518b, hsa-miR-518c, hsa-miR-518a-3p,
hsa-miR-518d-3p
hsa-miR-519c-3p, hsa-miR-519b-3p, hsa-miR-519a
hsa-miR-519c-5p, hsa-miR-519b-5p, hsa-miR-523*, hsa-miR-518f*,
hsa-miR-526a, hsa-miR-520c-5p, hsa-miR-518e*, hsa-miR-518d-5p,
hsa-miR-522*, hsa-miR-519a*
hsa-miR-519e, hsa-miR-33b*
hsa-miR-520a-5p, hsa-miR-525-5p
hsa-miR-520g, hsa-miR-520h
hsa-miR-524-5p, hsa-miR-520d-5p
hsa-miR-525-3p, hsa-miR-524-3p
hsa-miR-548b-5p, hsa-miR-548a-5p, hsa-miR-548c-5p,
hsa-miR-548d-5p
hsa-miR-7-1*, hsa-miR-7-2*
hsa-miR-99a, hsa-miR-100, hsa-miR-99b

[0339] We have constructed an 8-mer LNA-antimiR against miR-21, miR-155 and miR-122 (designated here as micromiR) that is fully LNA modified and phosphorothiolated (see FIG. 1 and Table 6). Our results from repeated experiments in MCF-7, HeLa, Raw and Huh-7 cells using a luciferase sensor plasmid for miR-21, miR-155 and miR-122 demonstrate that the fully LNA-modified short LNA-antimiRs are highly potent in antagonizing microRNAs.

TABLE 4
LNA_antimiR & MicromiR sequences and
predicted Tₘs

| SEQ | | | Tₘ |
|---|---|---|---|
| ID # | microRNA | sequence | (° C.) |
| 3204 | miR-21 | T c A G t C T G a T a A g C T | 73 |
| 3205 | | G A T A A G C T | 33 |
| 3206 | miR-155 | T c A c A A T t a G C A t T A | 63 |
| 3207 | | T A G C A T T A | 45 |
| 4 | miR-122 | C c A t t G T c a C a C t C C | 73 |
| 3208 | | C A C A C T C C | 62 |

Capital letters are LNA units, such as beta-D-oxy LNA. Lower case letters are DNA units. Internucleoside linkages are preferably phosphorothioate. LNA cytosines are all preferably methylated/5-methyl cytosine.

[0340] The melting temperatures can be assessed towards the mature microRNA sequence, using a synthetic microRNA oligonucleotide (typically consisting of RNA nucleotides with a phosphodiester backbone). Typically measured Tₘs are higher than predicted Tₘs when using LNA oligomers against the RNA target.

### Example 4

### Assessment of miR-21 Antagonism by SEQ ID #3205 LNA-AntimiR in MCF-7 Cells Using a Luciferase Sensor Assay

[0341] In order to assess the efficiency of a fully LNA-modified 8-mer LNA-antimiR (SEQ ID #3205) oligonucleotide in targeting and antagonizing miR-21, luciferase sensor constructs were made containing a perfect match target site for the mature miR-21 and as control, a target site with two mutations in the seed (FIG. 6). In order to monitor microRNA-21 inhibition, the breast carcinoma cell line MCF-7 was transfected with the different luciferase constructs together with the miR-21 antagonist SEQ ID #3205 at varying concentrations in comparison with a 15-mer LNA-antimiR SEQ ID #3204 against miR-21. After 24 hours, luciferase activity was measured.

[0342] Results: As seen in FIG. 2, the new fully LNA-modified 8-mer LNA-antimiR (SEQ ID #3205) shows two-fold higher potency compared to SEQ ID #3204, as shown by de-repression of the luciferase activity. By contrast, the control miR-21 sensor construct with two mismatches in the miR-21 seed did not show any de-repression of the firefly luciferase activity, thereby demonstrating the specificity of the perfect match miR-21 sensor in monitoring miR-21 activity in cells. The de-repression of luciferase activity by the 8-mer LNA-antimiR is clearly dose-dependent, which is not seen with SEQ ID #3204. Moreover, the new 8-mer is also much more potent at lower doses than SEQ ID #3204.

[0343] To conclude, the 8-mer LNA-antimiR (SEQ ID #3205) shows significantly improved potency in inhibition of miR-21 in vitro compared to the 15-mer LNA-antimiR SEQ ID #3204 targeting miR-21.

### Materials and Methods:

[0344] Cell line: The breast carcinoma cell line MCF-7 was purchased from ATCC (#HTB-22™). MCF-7 cells were cultured in EMEM medium, supplemented with 10% fetal bovine serum, 2 mM Glutamax, 1×NEAA and 25 ug/ml Gentamicin.

[0345] Transfection: 400.000 cells were seeded per well in a 6-well plate the day before transfection in order to receive 50-70% confluency the next day. On the day of transfection, MCF-7 cells were transfected with 0.8 ug miR-21 perfect match/psiCHECK2, miR-21.mm2/psiCHECK2 or empty psiCHECK2 vector (SDS Promega) together with 1 μl Lipofectamine-2000 (Invitrogen) according to manufacturer's instructions. After 24 hours, cells were harvested for luciferase measurements.

[0346] Luciferase assay: The cells were washed with PBS and harvested with cell scraper, after which cells were centrifugated for 5 min at 10.000 rpm. The supernatant was discarded and 50 μl 1× Passive Lysis Buffer (Promega) was added to the cell pellet, after which cells were put on ice for 30 min. The lysed cells were spinned at 10.000 rpm for 30 min after which 20 μl were transferred to a 96 well plate and luciferase measurements were performed according to manufacturer's instructions (Promega).

### Example 5

### Assessment of miR-21 Antagonism by SEQ ID #3205 LNA-AntimiR in Hela Cells Using a Luciferase Sensor Assay

[0347] To further assess the efficiency of the fully LNA-modified 8-mer LNA-antimiR SEQ ID #3205 in targeting miR-21, the cervix carcinoma cell line HeLa was also transfected with the previously described miR-21 luciferase sensor constructs alongside SEQ ID #3205 at varying concentrations as described in the above section (FIG. 3).

[0348] Results: The SEQ ID #3205 shows complete de-repression of the miR-21 luciferase sensor construct in HeLa cells already at 5 nM compared to SEQ ID #3204, which did not show complete de-repression until the highest dose (50 nM). In addition, antagonism of miR-21 by the 8-mer SEQ ID #3205 LNA-antimiR is dose-dependent. To demonstrate the specificity of the miR-21 luciferase sensor assay, a mismatched miR-21 target site (2 mismatches in seed) was also transfected into HeLa cells, but did not show any de-repression of the firefly luciferase activity.

[0349] To conclude, the fully LNA-modified SEQ ID #3205 shows significantly improved potency in inhibition of miR-21 in vitro, in both MCF-7 and HeLa cells compared to the 15-mer LNA-antimiR SEQ ID #3204.

### Materials and Methods:

[0350] Cell line: The human cervix carcinoma cell line HeLa was purchased from ECACC (#93021013). HeLa cells were cultured in EMEM medium, supplemented with 10% fetal bovine serum, 2 mM Glutamax, 1×NEAA and 25 ug/ml Gentamicin.

[0351] Transfection: 60.000 cells were seeded per well in a 24 well plate the day before transfection in order to receive 50-70% confluency the next day. On the day of transfection, HeLa cells were transfected with 0.2 ug miR-21 perfect match/psiCHECK2, miR-21.mm2/psiCHECK2 or empty psiCHECK2 vector together with 0.7 μl Lipofectamine-2000 (Invitrogen) according to manufacturer's instructions. After 24 hours, cells were harvested for luciferase measurements.

[0352] Luciferase assay: The cells were washed with PBS and 100 μl 1× Passive Lysis Buffer (Promega) was added to each well, after which the 24 well plates was put on an orbital shaker for 30 min. The cells were collected and transferred to an eppendorf tube and spinned at 10.000 rpm for 30 min after which 10 μl were transferred to a 96 well plate and luciferase measurements were performed according to manufacturer's instructions (Promega).

### Example 6

### Assessment of miR-155 Antagonism by SEQ ID #3207 LNA-antimir in Mouse RAW Cells Using a Luciferase Sensor Assay

[0353] To ask whether a fully LNA-modified 8-mer LNA-antimiR can effectively antagonize miR-155, a perfect match target site for miR-155 was cloned into the same luciferase vector (psiCHECK2) and transfected into the mouse leukaemic monocyte macrophage RAW cell line. Because the endogenous levels of miR-155 are low in the RAW cell line, the cells were treated with 100 ng/ml LPS for 24 hours in order to induce miR-155 accumulation.

[0354] Results: Luciferase measurements showed that the fully LNA-modified 8-mer LNA-antimiR SEQ ID #3207 targeting miR-155 was similarly effective in antagonizing miR-155 compared to the 15-mer LNA-antimiR SEQ ID #3206 (FIG. 4). Both LNA-antimirs showed a >50% de-repression of the miR-155 luciferase sensor at 0.25 nM concentration and inhibited miR-155 in a dose-dependent manner.

Conclusion: These data further support the results from antagonizing miR-21, as shown in examples 1 and 2, demonstrating that a fully thiolated 8-mer LNA-antimiR is highly potent in microRNA targeting.

### Materials and Methods:

[0355] Cell line: The mouse leukaemic monocyte macrophage RAW 264.7 was purchased from ATCC (TIB-71). RAW cells were cultured in DMEM medium, supplemented with 10% fetal bovine serum, 4 mM Glutamax and 25 ug/ml Gentamicin.

[0356] Transfection: 500,000 cells were seeded per well in a 6 well plate the day before transfection in order to receive 50% confluency the next day. On the day of transfection, MCF-7 cells were transfected with 0.3 ug miR-155 or empty psiCHECK2 vector together with 10 Lipofectamine-2000 (Invitrogen) according to manufacturer's instructions. In order to induce miR-155 accumulation, LPS (100 ng/ml) was added to the RAW cells after the 4 hour incubation with the transfection complexes. After another 24 hours, cells were harvested for luciferase measurements.

[0357] Luciferase assay: The cells were washed with PBS and harvested with cell scraper, after which cells were centrifugated for 5 min at 2.500 rpm. The supernatant were discarded and 50 μA 1× Passive Lysis Buffer (Promega) was added to the cell pellet, after which cells were put on ice for 30 min. The lysed cells were spinned at 10.000 rpm for 30 min after which 20 μl were transferred to a 96 well plate and luciferase measurements were performed according to manufacturer's instructions (Promega).

### Example 7

### Assessment of miR-122 Antagonism by SEQ ID #3208 LNA-AntimiR in HuH-7 Cells Using a Luciferase Sensor Assay

[0358] The potency of the fully modified 8-mer LNA-antimiR SEQ ID #3208 against miR-122 was assessed in the human hepatoma cell line HuH-7. The HuH-7 cells were transfected with luciferase sensor construct containing a perfect match miR-122 target site. After 24 hours luciferase measurements were performed (FIG. 5).

[0359] Results: The fully LNA-modified 8-mer LNA-antimiR SEQ ID #3208 is more potent than the 15-mer LNA-antimiR SEQ ID #4 at low concentration, as shown by de-repression of the miR-122 luciferase sensor. Both LNA-antimiRs inhibit miR-122 in a dose-dependet manner (FIG. 5).

[0360] Conclusion: The fully LNA-modified 8-mer LNA-antimiR SEQ ID #3208 targeting miR-122 shows improved potency in inhibition of miR-122 in vitro.

### Materials and Methods:

[0361] Cell line: The human hepatoma cell line HuH-7 was a kind gift from R. Bartenschlager, Heidelberg. Huh-7 cells were cultured in EMEM medium, supplemented with 10% fetal bovine serum, 2 mM Glutamax, 1×NEAA and 25 ug/ml Gentamicin.

[0362] Transfection: 8,000 cells were seeded per well in a 96 well plate the day before transfection in order to receive 50-70% confluency the next day. On the day of transfection, HuH-7 cells were transfected with 57 ng miR-122 or empty psiCHECK2 vector together with 1 μl Lipofectamine-2000 (Invitrogen). After 24 hours, cells were harvested for luciferase measurements.

[0363] Luciferase assay: 50 μl×Passive Lysis Buffer (Promega) was added to each well, after which the 96 well plate was put on an orbital shaker for 30 min. To each well the Dual-luciferase Reporter assay system (Promega) was added and luciferase measurements were performed according to manufacturer's instructions (Promega).

### Example 8

### Assessment of MIR-21 Antagonism by Comparing an 8-mer (SEQ ID #3205) Versus a 15-mer (SEQ ID #3204) LNA-AntimiR in Human Prostate Carcinoma Cells (PC3)

[0364] We have previously shown (patent application 1051), that an 8-mer LNA-antimiR that is fully LNA-modified and phosphorothiolated is able to completely de-repress the miR-21 luciferase reporter levels in the human cervix carcinoma cell line HeLa and partly de-repress the miR-21 luciferase reporter levels in the human breast carcinoma cell line MCF-7. We next extended this screening approach to the human prostate cancer cell line PC3. To assess the efficiency of the different LNA-antimiR oligonucleotides against miR-21, luciferase reporter constructs were generated in which a perfect match target site for the mature miR-21 and a target site with two mismatches in the seed were cloned in the 3′UTR of Renilla luciferase gene (FIG. 7). In order to monitor miR-21 inhibition, PC3 cells were transfected with the different luciferase constructs together with the miR-21 antagonist SEQ ID #3205 (8-mer) and for comparison with the 15-mer LNA-antimiR perfect match SEQ ID #3204 at varying concentrations. After 24 hours, luciferase activity was measured.

[0365] Results: The luciferase reporter experiments showed a dose-dependent de-repression of the luciferase miR-21 reporter activity with the 15-mer LNA-antimiR against miR-21 (SEQ ID #3204). However, complete de-repression of the luciferase reporter was not obtained even at the highest concentrations (FIG. 7). In contrast, the cells that were transfected with the 8-mer fully LNA substituted LNA-antimiR showed complete de-repression already at 1 nM, indicating significantly improved potency compared to the 15-mer LNA-antimiR. The luciferase control reporter harboring a mismatch target site for miR-21 was not affected by either LNA-antimiR, demonstrating high specificity of both LNA-antimiRs.

[0366] Conclusion: The micromer is far more potent than the 15-mer LNA-antimiR in targeting miR-21 and has so far shown to be most potent in prostate carcinoma cells.

### Materials and Methods:

[0367] Cell line: The human prostate carcinoma PC3 cell line was purchased from ECACC (#90112714). PC3 cells were cultured in DMEM medium, supplemented with 10% fetal bovine serum, 2 mM Glutamax and 25 ug/ml Gentamicin.

[0368] Transfection: 100,000 cells were seeded per well in a 12-well plate the day before transfection in order to receive 50% confluency the next day. On the day of transfection, PC3 cells were transfected with 0.3 μg miR-21 or empty psiCHECK2 vector together with 1.2 μl Lipofectamine-2000 (Invitrogen) according to manufacturer's instructions. Transfected was also varying concentrations of LNA-antimiRs. After 24 hours, cells were harvested for luciferase measurements.

[0369] Luciferase assay: The cells were washed with PBS and 250 μl 1× Passive Lysis Buffer (Promega) was added to the wells. The plates were placed on a shaker for 30 min., after which the cell lysates were transferred to eppendorf tubes. The cell lysate was centrifugated for 10 min at 2.500 rpm after which 20 μl were transferred to a 96 well plate and luciferase measurements were performed according to manufacturer's instructions (Promega).

### Example 9

### Specificity Assessment of miR-21 Antagonism by an 8-mer LNA-AntimiR

[0370] To investigate the specificity of our short LNA-antimiR targeting miR-21, we designed an 8-mer mismatch control LNA-antimiR (SEQ ID #3218) containing 2 mismatches in the seed recognition sequence (see FIG. 8). The luciferase reporter constructs described in example 1 were transfected into the human cervix carcinoma cell line HeLa together with the LNA mismatch control oligo SEQ ID #3218 and its efficacy was compared with the 8-mer LNA-antimiR (SEQ ID #3205) targeting miR-21. After 24 hours, luciferase activity was measured.

[0371] Results: As shown in FIG. 8, transfection of the fully LNA-modified 8-mer LNA-antimiR in HeLa cells resulted in complete de-repression of the luciferase miR-21 reporter already at 5 nM. In contrast, when the cells were transfected with the 8-mer LNA mismatch control oligo, combined with the results obtained with the control miR-21 luciferase reporter having two mismatches in the miR-21 seed, these data demonstrate high specificity of the fully LNA-substituted 8-mer LNA-antimiR in targeting miR-21 in Hela cells. Analysis of the miRBase microRNA sequence database showed that the miR-21 recognition sequence, of the LNA-antimiR SEQ ID #3205 is unique for microRNA-21. However, when decreasing the micromer length to 7 nt, it is not specific for only miR-21, since ath-miR-844, mmu-miR-590-3p and has-miR-590-3p are also targeted.

[0372] Conclusion: Exchanging two nucleotide positions within the 8-mer LNA-antimiR with two mismatching nucleotides completely abolished the antagonizing activity of the LNA-antimiR for miR-21.

### Materials and Methods:

[0373] Cell line: The human cervix carcinoma cell line HeLa was purchased from ECACC (#93021013). HeLa cells were cultured in EMEM medium, supplemented with 10% fetal bovine serum, 2 mM Glutamax, 1×NEAA and 25 ug/ml Gentamicin.

[0374] Transfection: 60,000 cells were seeded per well in a 24-well plate the day before transfection in order to receive 50-70% confluency the next day. On the day of transfection, HeLa cells were transfected with 0.2 ug miR-21 perfect match/psiCHECK2, miR-21.mm2/psiCHECK2 or empty psiCHECK2 vector together with 0.7 μl Lipofectamine-2000 (Invitrogen) according to manufacturer's instructions. Transfected was also varying concentrations of LNA-antimiRs. After 24 hours, cells were harvested for luciferase measurements.

[0375] Luciferase assay: The cells were washed with PBS and 100 μl 1× Passive Lysis Buffer (Promega) was added to each well, after which the 24-well plates were put on an orbital shaker for 30 min. The cells were collected and transferred to an eppendorf tube and spinned at 10.000 rpm for 30 min after which 10 μl were transferred to a 96-well plate and luciferase measurements were performed according to manufacturer's instructions (Promega).

### Example 10

### Assessment of the Shortest Possible Length of a Fully LNA-Modified LNA-AntimiR that Mediates Effective Antagonism of miR-21

[0376] To further investigate the LNA-antimiR length requirements, we designed a 7-mer and a 6-mer LNA-antimiR targeting miR-21, both fully LNA-modified and phosphorothiolated oligonucleotides. The miR-21 luciferase reporter constructs were transfected into HeLa cells along with the LNA-antimiRs at varying concentrations. Luciferase measurements were performed after 24 hours.

[0377] Results: As seen in FIG. 9, the 7-mer LNA-antimiR mediates de-repression of the miR-21 luciferase reporter plasmid, but at lower potency compared to the 8-mer LNA-antimiR (SEQ ID #3205). Nevertheless, a dose-dependent trend can still be observed. By contrast, the 6-mer LNA-antimiR did not show any inhibitory activity.

[0378] Conclusion: To conclude, the shortest possible length of an LNA-antimiR which is able to mediate miR-21 inhibition is 7 nucleotides. However, the 7-mer LNA-antimiR is less potent compared to the 8-mer LNA-antimiR for miR-21.

### Materials and Methods:

[0379] Cell line: The human cervix carcinoma cell line HeLa was purchased from ECACC (#93021013). HeLa cells were cultured in EMEM medium, supplemented with 10% fetal bovine serum, 2 mM Glutamax, 1×NEAA and 25 ug/ml Gentamicin.

[0380] Transfection: 60,000 cells were seeded per well in a 24 well plate the day before transfection in order to receive 50-70% confluency the next day. On the day of transfection, HeLa cells were transfected with 0.2 ug miR-21 perfect match/psiCHECK2, miR-21.mm2/psiCHECK2 or empty psiCHECK2 vector together with 0.7 μl Lipofectamine-2000 (Invitrogen) according to manufacturer's instructions. Transfected was also varying concentrations of LNA-antimiRs. After 24 hours, cells were harvested for luciferase measurements.

[0381] Luciferase assay: The cells were washed with PBS and 100 μl 1× Passive Lysis Buffer (Promega) was added to each well, after which the 24-well plates was put on an orbital shaker for 30 min. The cells were collected and transferred to an eppendorf tube and spinned at 10.000 rpm for 30 min after which 10 μl were transferred to a 96-well plate and luciferase measurements were performed according to manufacturer's instructions (Promega).

### Example 11

### Length Assessment of Fully LNA-Substituted LNA-AntimiRs Antagonizing miR-21

[0382] Next, we investigated the effect of increasing the length from a 9-mer to a 14-mer fully LNA substituted LNA-antimiRs on antagonizing miR-21 in HeLa cells. The resulting LNA-antimiRs were transfected into HeLa cells together with the miR-21 luciferase reporter constructs (FIG. 10). Luciferase measurements were performed after 24 hours.

[0383] Results: The 9-mer LNA-antimiR SEQ ID #3211 (9-mer) showed dose-dependent de-repression of the miR-21 luciferase reporter which did not reach complete de-repression, as demonstrated for the 7-mer LNA-antimiR (SEQ ID #3210). Increasing the length to 10-mer to 14-mer (SEQ ID #3212, SEQ ID #3213 and SEQ ID #3214) decreased the potency as shown by less efficient de-repression of the miR-21 reporter.

[0384] Conclusion: As shown in FIG. 10, the longest fully LNA-modified and phosphorothiolated LNA-antimiR which is still able to mediate miR-21 inhibition is a 9-mer LNA-antimiR SEQ ID #3211. However, it is clearly less efficient than the 7-mer and 8-mer LNA-antimiRs.

[0385] Materials and Methods: Cell line: The human cervix carcinoma cell line HeLa was purchased from ECACC (#93021013). HeLa cells were cultured in EMEM medium, supplemented with 10% fetal bovine serum, 2 mM Glutamax, 1×NEAA and 25 ug/ml Gentamicin.

[0386] Transfection: 60,000 cells were seeded per well in a 24-well plate the day before transfection in order to achieve 50-70% confluency the next day. On the day of transfection, HeLa cells were transfected with 0.2 ug miR-21 perfect match/psiCHECK2, miR-21.mm2/psiCHECK2 or empty psiCHECK2 control vector without target site together with 0.7 μl Lipofectamine-2000 (Invitrogen) according to manufacturer's instructions. Transfected was also varying concentrations of LNA-antimiRs. After 24 hours, cells were harvested for luciferase measurements.

[0387] Luciferase assay: The cells were washed with PBS and 100 μl 1× Passive Lysis Buffer (Promega) was added to each well, after which the 24-well plates were put on an orbital shaker for 30 min. The cells were collected and transferred to an eppendorf tube and spinned at 10.000 rpm for 30 min after which 10 μl were transferred to a 96-well plate and luciferase measurements were performed according to manufacturer's instructions (Promega).

### Example 12

### Determination of the Most Optimal Position for an 8-mer LNA-AntimiR within the mir Target Recognition Sequence

[0388] Our experiments have shown that the most potent fully LNA-modified phosphorothiolated LNA-antimiR is 8 nucleotides in length. To assess the most optimal position for an 8-mer LNA-antimiR within the miR target recognition sequence, we designed four different fully LNA-modified 8-mer LNA-antimiRs tiled across the mature miR-21 sequence as shown in FIG. 11. The different LNA-antimiRs were co-transfected together with the miR-21 luciferase reporter constructs into HeLa cells. Luciferase measurements were performed after 24 hours.

[0389] Results: The only LNA-antimiR that mediated efficient silencing of miR-21 as measured by the luciferase reporter was SEQ ID #3205, which targets the seed region of miR-21. Neither SEQ ID #3215 which was designed to cover the 3′ end of the seed (50% seed targeting) did not show any effect, nor did the other two LNA-antimiRs SEQ ID #3216 or SEQ ID #3217, which were positioned to target the central region and the 3′ end of the mature miR-21, respectively.

[0390] Conclusion: The only 8-mer LNA-antimiR mediating potent silencing of miR-21 is the one targeting the seed of the miR-21.

### Materials and Methods:

[0391] Cell line: The human cervix carcinoma cell line HeLa was purchased from ECACC (#93021013). HeLa cells were cultured in EMEM medium, supplemented with 10% fetal bovine serum, 2 mM Glutamax, 1×NEAA and 25 ug/ml Gentamicin.

[0392] Transfection: 60,000 cells were seeded per well in a 24-well plate the day before transfection in order to achieve 50-70% confluency the next day. On the day of transfection, HeLa cells were transfected with 0.2 ug miR-21 perfect match/psiCHECK2, miR-21.mm2/psiCHECK2 or empty psiCHECK2 vector together with 0.7 μl Lipofectamine-2000 (Invitrogen) according to the manufacturer's instructions. Transfected was also varying concentrations of LNA-antimiRs. After 24 hours, cells were harvested for luciferase measurements.

[0393] Luciferase assay: The cells were washed with PBS and 100 μl 1× Passive Lysis Buffer (Promega) was added to each well, after which the 24-well plates was put on an orbital shaker for 30 min. The cells were collected and transferred to an eppendorf tube and spinned at 10.000 rpm for 30 min after which 10 μl were transferred to a 96 well plate and luciferase measurements were performed according to manufacturer's instructions (Promega).

### Example 13

### Validation of Interaction of the miR-21 Target Site in the Pdcd-4-3″-UTR and miR-21 Using the 8-mer SEQ ID #3205 LNA-AntimiR

[0394] The tumour suppressor protein Pdcd4 inhibits TPA-induced neoplastic transformation, tumour promotion and progression. Pdcd4 has also been shown to be upregulated in apoptosis in response to different inducers. Furthermore, downregulation of Pdcd4 in lung and colorectal cancer has also been associated with a poor patient prognosis. Recently, Asangani etal and Frankel et al showed that the Pdcd-4-3′-UTR contains a conserved target site for miR-21, and transfecting cells with an antimiR-21, resulted in an increase in Pdcd4 protein. We therefore constructed a luciferase reporter plasmid, harboring 313 nt of the 3′UTR region of Pdcd4 encompassing the aforementioned miR-21 target site, which was co-transfected together with different LNA-antimiRs into HeLa cells. The different LNA-antimiRs were; SEQ ID #3205 (8-mer, perfect match) or SEQ ID #3218 (8-mer, mismatch). Luciferase measurements were performed after 24 hours.

Results: As shown in FIG. 12, in cells transfected with the Pdcd4 3′UTR luciferase reporter and SEQ ID #3205, an increase in luciferase activity was observed, indicating interaction between the Pdcd4 3′UTR and miR-21. However, transfecting the cells with the mismatch compound, SEQ ID #3218, no change in luciferase activity was observed, which was expected since the compound does not antagonize miR-21. When comparing the 8-mer LNA-antimiR against two longer designed LNA-antimiRs, the short fully LNA-modified and phosphorothiolated LNA-antimiR was significantly more potent, confirming previous luciferase assay data.

[0395] Conclusion: These data conclude that SEQ ID #3205, which antagonizes miR-21, can regulate the interaction between Pdcd4 3′UTR and miR-21.

### Materials and Methods:

[0396] Cell line: The human cervix carcinoma cell line HeLa was purchased from ECACC (#93021013). HeLa cells were cultured in EMEM medium, supplemented with 10% fetal bovine serum, 2 mM Glutamax, 1×NEAA and 25 ug/ml Gentamicin.

[0397] Transfection: 60,000 cells were seeded per well in a 24-well plate the day before transfection in order to achieve 50-70% confluency the next day. On the day of transfection, HeLa cells were transfected with 0.2 ug Pdcd-4-3′UTR/psiCHECK2 or empty psiCHECK2 vector together with 0.7 μl Lipofectamine-2000 (Invitrogen) according to the manufacturer's instructions. Varying concentrations of the LNA-antimiR oligonucleotides were also transfected. After 24 hours, cells were harvested for luciferase measurements.

[0398] Luciferase assay: The cells were washed with PBS and 100 μl 1× Passive Lysis Buffer (Promega) was added to each well, after which the 24-well plates was put on an orbital shaker for 30 min. The cells were collected and transferred to an eppendorf tube and spinned at 10.000 rpm for 30 min after which 10 μl were transferred to a 96 well plate and luciferase measurements were performed according to manufacturer's instructions (Promega).

### Example 14

### Comparison of an 8-mer LNA-AntimiR (SEQ ID #3207) with a 15-mer LNA-antimiR (SEQ ID #3206) in Antagonizing miR-155 in Mouse RAW Cells

[0399] To ask whether our approach of using short LNA-antimiRs could be adapted to targeting other miRNAs we designed a fully LNA-modified 8-mer LNA-antimiR against microRNA-155. A perfect match target site for miR-155 was cloned into the 3′UTR of the luciferase gene in the reporter plasmid psiCHECK2 and transfected into the mouse RAW macrophage cell line together with an 8-mer or a 15-mer LNA-antimiR. Because the endogenous levels of miR-155 are low in the RAW cell line, the cells were treated with 100 ng/ml LPS for 24 hours in order to induce miR-155 accumulation. After 24 hours, luciferase analysis was performed.

[0400] Results: Luciferase measurements showed that the fully LNA-modified 8-mer LNA-antimiR SEQ ID #3207 targeting miR-155 was similarly effective in antagonizing miR-155 compared to the 15-mer LNA-antimiR SEQ ID #3206 (FIG. 13). Both LNA-antimiRs showed a >50% de-repression of the miR-155 luciferase sensor at 0.25 nM concentration and inhibited miR-155 in a dose-dependent manner.

[0401] Analysis of the miRBase microRNA sequence database showed that the miR-155 recognition sequence, of the LNA-antimiR SEQ ID #3207 is unique for microRNA-155. However, when decreasing the LNA-antimiR length to 7 nt, it is not specific for only miR-155, mdv1-miR-M4 and kshv-miR-K12-11 is also targeted.

[0402] Conclusion: A fully LNA-modified and phosphorothiolated 8-mer LNA-antimiR is equally potent compared with a 15-mer LNA-antimiR of a mixed LNA/DNA design in antagonizing miR-155. Thus, our approach of using short LNA-antimiRs can be readily adapted to targeting of other miRNAs

### Materials and Methods:

[0403] Cell line: The mouse macrophage RAW 264.7 cell line was purchased from ATCC (TIB-71). RAW cells were cultured in DMEM medium, supplemented with 10% fetal bovine serum, 4 mM Glutamax and 25 ug/ml Gentamicin.

[0404] Transfection: 500,000 cells were seeded per well in a 6-well plate the day before transfection in order to receive 50% confluency the next day. On the day of transfection, RAW 264.7 cells were transfected with 0.3 ug miR-155 perfect match/psiCHECK2 or empty psiCHECK2 vector together with 10 μl Lipofectamine-2000 (Invitrogen) according to the manufacturer's instructions. Transfected was also varying concentrations of LNA-antimiRs. In order to induce miR-155 accumulation, LPS (100 ng/ml) was added to the RAW cells after the 4 hour incubation with the transfection complexes. After another 24 hours, cells were harvested for luciferase measurements.

[0405] Luciferase assay: The cells were washed with PBS and harvested with cell scraper, after which cells were spinned for 5 min at 2.500 rpm. The supernatant was discarded and 50 μl 1× Passive Lysis Buffer (Promega) was added to the cell pellet, after which cells were put on ice for 30 min. The lysed cells were spinned at 10.000 rpm for 30 min after which 20 μl were transferred to a 96-well plate and luciferase measurements were performed according to the manufacturer's instructions (Promega).

### Example 15

### Assessment of c/EBPβ Protein Levels as a Functional Readout for miR-155 Antagonism by Short LNA-AntimiR (SEQ ID #3207)

[0406] As a functional readout for miR-155 antagonism by short LNA-antimiR (SEQ ID #3207) we determined the protein levels of a novel miR-155 target, c/EBPβ. The mouse macrophage RAW cell line was transfected together with either an 8-mer (SEQ ID #3207) or a 15-mer (SEQ ID #3206) LNA-antimiR in the absence or presence of pre-miR-155. As mismatch controls for the 15-mer, SEQ ID #4 was used, which targets miR-122 and for the 8-mer SEQ ID #3205 was used, which targets miR-21. These two control miRNAs do not regulate c/EBPβ expression levels. LPS was used to induce miR-155 accumulation and cells were harvested after 16 hours with LPS. c/EBPβ has three isoforms; LIP, LAP and LAP* that were detected by Western blot analysis and the same membranes were re-probed with beta-tubulin as loading control.

[0407] Results: Ratios were calculated for c/EBPβ LIP and beta-tubulin as indicated in FIG. 14. RAW cells that were transfected with the 15-mer LNA-antimiR and no pre-miR-155 all showed equal c/EBPβ LIP/beta-tubulin ratios, due to inhibition of miR-155 increases the c/EBPβ LIP levels (FIG. 14, left panel). By comparison, transfection of pre-miR-155 in RAW cells resulted in decreased c/EBPβ LIP levels as expected, if c/EBPβ was a miR-155 target, as shown in lanes with protein extracts from RAW cells treated with no LNA or a mismatch. However, protein extracts from RAW cells transfected with LNA-antimiR against miR-155, showed an increase of c/EBPβ LIP levels. The same experiments were also carried out with the 8-mer LNA-antimiR-155 (SEQ ID #3207) and as shown in FIG. 14 (right panel) comparable results to those with the 15-mer LNA-antimiR SEQ ID #3206 were obtained.

[0408] Conclusion: Antagonism of miR-155 using either an 8-mer or a 15-mer LNA-antimiR leads to de-repression of the direct target c/EBPβ.

### Materials and Methods:

[0409] Cell line: The mouse macrophage RAW 264.7 cell line was purchased from ATCC (TIB-71). RAW cells were cultured in DMEM medium, supplemented with 10% fetal bovine serum, 4 mM Glutamax and 25 ug/ml Gentamicin.

[0410] Transfection: 500,000 cells were seeded per well in a 6-well plate the day before transfection in order to achieve 50% confluency the next day. On the day of transfection, RAW 264.7 cells were transfected with 5 nmol pre-miR-155 (Ambion) and/or 5 nM LNA-antimiR together with 10 μl Lipofectamine-2000 (Invitrogen) according to the manufacturer's instructions. Transfected was also varying concentrations of LNA-antimiRs. In order to induce miR-155 accumulation, LPS (100 ng/ml) was added to the RAW cells after the 4 hour incubation with the transfection complexes. After 16 hours, cells were harvested for protein extraction and western blot analysis.

[0411] Western blot: Cells were washed with PBS, trypsinated, transferred to eppendorf tubes and 250 μl lysis buffer (1×RIPA) was added. The cell lysate was placed on ice for 20 min and spinned at 10,000 rpm for 10 minutes. The protein concentration was measured with Coomassie Plus according to the manufacturer's instructions and 80 ug was loaded onto a 4-12% BIS-TRIS gel. The membrane was incubated overnight at 4° C. with the primary monoclonal mouse antibody C/EBP β (Santa Cruz) with a 1:100 concentration. Immunoreactive bands were visualized with ECL Plus (Amersham).

### Example 16

### Antagonism of miR-106b by a Fully LNA-Modified 8-mer (SEQ ID #3221) LNA-AntimiR

[0412] To confirm that our approach of using short LNA-antimiRs could be adapted to targeting of other miRNAs we designed a fully LNA-modified 8-mer LNA-antimiR against microRNA-106b. A perfect match target site for miR-106b was cloned into the 3′UTR of the luciferase gene in the vector (psiCHECK2) and transfected into the human cervix carcinoma HeLa cell line together with a short LNA-antimiR (SEQ ID #3221) or with a 15-mer LNA-antimiR (SEQ ID #3228) at varying concentrations. Luciferase measurements were performed after 24 hours.

[0413] Results: Transfection of the 8-mer LNA-antimiR SEQ ID #3221 against miR-106b resulted in dose-dependent inhibition of miR-106b as shown by de-repression of the luciferase reporter, which was completely de-repressed at 1 nM LNA-antimiR concentration (FIG. 15). Comparable results were obtained using the 15-mer LNA-antimiR SEQ ID #3228 demonstrating that an 8-mer LNA-antimiR is similarly potent to a 15-mer.

[0414] Conclusion: Targeting of miR-106b in HeLa cells shows that an 8-mer fully LNA-modified and phosphorotiolated LNA-antimiR is equally potent compared with a 15-mer LNA/DNA mixmer LNA-antimiR.

### Materials and Methods:

[0415] Cell line: The human cervix carcinoma cell line HeLa was purchased from ECACC (#93021013). HeLa cells were cultured in EMEM medium, supplemented with 10% fetal bovine serum, 2 mM Glutamax, 1×NEAA and 25 ug/ml Gentamicin.

[0416] Transfection: 5.200 cells were seeded per well in a 96-well plate the day before transfection in order to achieve 50-70% confluency the next day. On the day of transfection, HeLa cells were transfected with 57 ng miR-21 perfect match/psiCHECK2, miR-21.mm2/psiCHECK2 or empty psiCHECK2 vector together with 0.14 μl Lipofectamine-2000 (Invitrogen) according to the manufacturer's instructions. Transfected was also varying concentrations of LNA-antimiRs. After 24 hours, cells were harvested for luciferase measurements.

[0417] Luciferase assay: The cells were washed with PBS and 30 μl 1× Passive Lysis Buffer (Promega) was added to each well, after which the 24-well plates was put on an orbital shaker for 30 min. The cells were collected and transferred to eppendorf tubes and spinned at 10,000 rpm for 30 min after which luciferase measurements were performed according to the manufacturer's instructions (Promega).

### Example 17

### Antagonism of miR-19a by a Fully LNA-Modified 8-mer (SEQ ID #3222) LNA-AntimiR

[0418] To further confirm that our approach of using short LNA-antimiRs can be readily adapted to targeting of other miRNAs we designed a fully LNA-modified 8-mer LNA-antimiR against microRNA-19a. A perfect match target site for miR-19a was cloned in the 3′UTR of the luciferase gene in the psiCHECK2 vector. The reporter plasmid was transfected into the human cervix carcinoma HeLa cell line together with a short LNA-antimiR (SEQ ID #3222) or with a 15-mer LNA-antimiR (SEQ ID #3229) targeting miR-19a at varying concentrations. Luciferase measurements were performed after 24 hours.

[0419] Results: As shown in FIG. 16, transfection of the 15-mer LNA-antimiR SEQ ID #3229 into HeLa efficiently antagonizes miR-19a as demonstrated by complete de-repression at 1 nM LNA-antimiR concentration. By comparison, transfection of the 8-mer LNA-antimiR SEQ ID #3222 resulted in effective miR-19a antagonism already at 0.5 nM concentration, indicating that this 8-mer LNA-antimiR is at least equally potent compared with a 15-mer LNA-antimiR in HeLa cells.

[0420] Conclusion: Targeting of miR-19a in HeLa cells shows that an 8-mer fully LNA-modified and phosphorothiolated LNA-antimiR is at least equally potent compared with a 15-mer LNA/DNA mixmer LNA-antimiR.

[0421] Materials and Methods: Cell line: The human cervix carcinoma cell line HeLa was purchased from ECACC (#93021013). HeLa cells were cultured in EMEM medium, supplemented with 10% fetal bovine serum, 2 mM Glutamax, 1×NEAA and 25 ug/ml Gentamicin.

[0422] Transfection: 5,200 cells were seeded per well in a 96-well plate the day before transfection in order to achieve 50-70% confluency the next day. On the day of transfection, HeLa cells were transfected with 57 ng miR-21 perfect match/psiCHECK2, miR-21.mm2/psiCHECK2 or empty psiCHECK2 vector together with 0.14 μl Lipofectamine-2000 (Invitrogen) according to manufacturer's instructions. Transfected was also varying concentrations of LNA-antimiRs. After 24 hours, cells were harvested for luciferase measurements.

[0423] Luciferase assay: The cells were washed with PBS and 30 μl 1× Passive Lysis Buffer (Promega) was added to each well, after which the 24-well plates was put on an orbital shaker for 30 min. The cells were collected and transferred to eppendorf tubes and spinned at 10.000 rpm for 30 min after which luciferase measurements were performed according to the manufacturer's instructions (Promega).

### Example 18

### Targeting of a MicroRNA Family Using Short, Fully LNA-Substituted LNA-AntimiR

[0424] Next, we investigated whether it is possible to target a microRNA family using a single short 7-mer LNA-antimiR complementary to the seed sequence that is common for all family members (see FIG. 17). In this experiment, we focused on miR-221 and miR-222 that are overexpressed in solid tumors of the colon, pancreas, prostate and stomach. It has also been shown that miR-221 and miR-222 are the most significantly upregulated microRNAs in glioblastoma multiforme. Furthermore, overexpression of miR-221 and miR-222 may contribute to the growth and progression of prostate carcinoma, at least in part by blocking the tumor suppressor protein p27. A perfect match target site for both miR-221 and miR-222, respectively, was cloned into the 3′UTR of the luciferase gene resulting in two reporter constructs. These constructs were then transfected either separate or combined into the prostate carcinoma cell line, PC3. In addition to the 7-mer, targeting both miR-221 and miR-222, we also co-transfected a 15-mer LNA-antimiR (15mer) targeting either miR-221 (SEQ ID #3223) or miR-222 (SEQ ID #3224), each transfected separately or together (see FIG. 18 left).

[0425] Results: As shown in FIG. 18, transfection of PC3 cells with the LNA-antimiR SEQ ID #3223 against miR-221 resulted in efficient inhibition of miR-221 at 1 nM LNA-antimiR concentration. An inhibitory effect is also observed when using the luciferase reporter plasmid for miR-222 as well as when co-transfecting both luciferase reporters for miR-221 and miR-222 simultaneously into PC3 cells. This inhibitory effect is most likely due to the shared seed sequence between miR-221 and miR-222. Similarly, transfection of PC3 cells with the LNA-antimiR SEQ ID #3224 against miR-222 resulted in efficient inhibition of miR-222 at 1 nM LNA-antimiR concentration as shown by complete de-repression of the luciferase reporter for miR-222. An inhibitory effect is also observed when using the luciferase reporter plasmid for miR-222 as well as when co-transfecting both luciferase reporters for miR-221 and miR-222 simultaneously into PC3 cells. Co-transfection of both LNA-antimiR compounds SEQ ID #3223 and SEQ ID #3224 against miR-221 and miR-222, respectively, (see FIG. 18 left), resulted in effective inhibition of both miRNAs as shown by complete de-repression of the luciferase reporter plasmids both when separately transfected and when co-transfected into PC3 cells. Interestingly, transfection of a single fully LNA-modified 7-mer LNA-antimiR (SEQ ID #3225) targeting the seed sequence of miR-221 and miR-222 into PC3 cells resulted in efficient, dose-dependent antagonism of miR-221 and miR-222 simultaneously as shown by complete de-repression of the luciferase reporter plasmids both when separately transfected and when co-transfected into PC3 cells. This demonstrates that a single, short LNA-substituted LNA-antimiR can effectively target seed sequences thereby antagonizing entire microRNA families simultaneously. Analysis of the miRBase microRNA sequence database showed that the miR-221/222 seed recognition sequence, of the LNA-antimiR SEQ ID #3225 is unique for both miRNAs.

[0426] Conclusion: Our results demonstrate that LNA enables design and synthesis of short fully LNA-substituted LNA-antimiR oligonucleotides that can effectively target microRNA seed sequences thereby antagonizing entire microRNA families simultaneously.

### Materials and Methods:

[0427] Cell line: The human prostate carcinoma PC3 cell line was purchased from ECACC (#90112714) PC3 cells were cultured in DMEM medium, supplemented with 10% fetal bovine serum, 2 mM Glutamax and 25 ug/ml Gentamicin.

[0428] Transfection: 100,000 cells were seeded per well in a 12-well plate the day before transfection in order to receive 50% confluency the next day. On the day of transfection, PC3 cells were transfected with 0.3 ug of luciferase reporter plasmid for miR-221 or for miR-222 or with empty psiCHECK2 vector without miRNA target site as control together with 1.2 μl Lipofectamine-2000 (Invitrogen) according to the manufacturer's instructions. After 24 hours, cells were harvested for luciferase measurements.

[0429] Luciferase assay: The cells were washed with PBS and 250 μl 1× Passive Lysis Buffer (Promega) was added to the wells. The plates were placed on a shaker for 30 min., after which the cell lysates was transferred to eppendorf tubes. The cell lysate was spinned for 10 min at 2,500 rpm after which 20 ml were transferred to a 96-well plate and luciferase measurements were performed according to the manufacturer's instructions (Promega).

### Example 19

### Assessment of p27 Protein Levels as a Functional Readout for Antagonism of the miR-221/222 Family by the 7-mer SEQ ID #3225 LNA-AntimiR

[0430] Previous work has shown (Ie Sage et al. 2007, Galardi et al. 2007) that miR-221 and miR-222 post-transcriptionally regulate the expression of the tumour suppressor gene p27, which is involved in cell cycle regulation. In these studies, down-regulation of miR-221 and miR-222 was shown to increase expression levels of p27. Thus, as a functional readout for antagonism of the miR-221/222 family by the 7-mer SEQ ID #3225 LNA-antimiR we determined the protein levels of p27 after transfection of the LNA-antimiR SEQ ID #3225 into PC3 cells in comparison with an 8-mer LNA mismatch control. After 24 hours the cells were harvested for western blot analysis (FIG. 19).

[0431] Results: As shown in FIG. 19, transfection of the 7-mer LNA-antimiR SEQ ID #3225 targeting the seed sequence in miR-221 and miR-222 resulted in dose-dependent increase of the p27 protein levels compared to either untransfected or LNA mismatch control transfected PC3 cells. These results clearly demonstrate that the 7-mer LNA-antimiR is able to effectively antagonize the miR-221/222 family leading to de-repression of the direct target p27 at the protein level.

[0432] Conclusion: A fully LNA-modified 7-mer LNA-antimiR targeting the seed sequence in the miR-221/222 family effectively antagonized both miRNAs leading to de-repression of the direct target p27 at the protein level.

### Materials and Methods:

[0433] Cell line: The human prostate carcinoma PC3 cell line was purchased from ECACC (#90112714) PC3 cells were cultured in DMEM medium, supplemented with 10% fetal bovine serum, 2 mM Glutamax and 25 ug/ml Gentamicin.

[0434] Transfection: 250,000 cells were seeded per well in a 6-well plate the day before transfection in order to receive 50% confluency the next day. On the day of transfection, PC3 cells were transfected with LNA-antimiRs at varying concentrations with Lipofectamine-2000. Cells were harvested after 24 hours for protein extraction and western blot analysis.

[0435] Western blot: Cells were washed with PBS, trypsinated, transferred to eppendorf tubes and 250 μl lysis buffer (1×RIPA) was added. The cell lysate was placed on ice for 20 min, then spinned at 10,000 rpm for 10 minutes. The protein concentration was measured with Coomassie Plus according to the manufacturer's instructions and 100 ug was loaded onto a 4-12% BIS-TRIS gel. The membrane was incubated overnight at 4° C. with the primary monoclonal mouse antibody p27 (BD Biosciences) at a 1:1000 dilution. Immunoreactive bands were visualized with ECL Plus (Amersham).

### Example 20

### Duplex Melting Temperatures (Tₘ) of the LNA-AntimiRs

[0436] As shown in Table 5, Tₘ values increase with increasing the length of short fully modified LNA-antimiRs (see Tₘ values for SEQ ID #3205, SEQ ID #3209-3214 in Table 7). Most optimal inhibitory effect was achieved with the 8-mer LNA-antimiR SEQ ID #3205 against miR-21, whereas the very low Tm of the 6-mer SEQ ID #3209 is most likely not sufficient to mediate antagonism of the miR-21 target. On the other hand, increasing the length beyond a 10-mer (SEQ ID #3212) significantly increases the Tₘ, while simultaneously decreasing the inhibitory activity as measured using the luciferase miR-21 reporter, which is most likely due to high propensity of the fully modified 12- and 14-mer LNA-antimiRs to form homodimers. The experiments using a sliding window of fully LNA-modified 8-mer LNA-antimirs across the mir-21 recognition sequence clearly demonstrate that in addition to adequate Tₘ value of the LNA-antimiR, the seed region is most critical for miRNA function and, thus, the most optimal region to be targeted by an LNA-antimiR.

TABLE 5
Tₘvalues for miR-21 LNA-antimiRs, measured
against a complementary RNA oligonucleotide

| | | | | Measured |
|---|---|---|---|---|
| SEQ | | Length | | Tₘ(RNA) |
| ID # | microRNA | (bp) | Sequence | ° C. |
| 3205 | miR-21 | 8 | 5′-GATAAGCT-3′ | 64.0 |
| 3209 | miR-21 | 6 | 5′-TAAGCT-3′ | 32.0 |
| 3210 | miR-21 | 7 | 5′-ATAAGCT-3′ | 45.0 |
| 3211 | miR-21 | 9 | 5′-TGATAAGCT-3′ | 65.0 |
| 3212 | miR-21 | 10 | 5′-CTGATAAGCT-3′ | 63.0 |
| 3213 | miR-21 | 12 | 5′-GTCTGATAAGCT-3′ | 86.8 |
| 3214 | miR-21 | 14 | 5′-CAGTCTGATAAGCT-3′ | 89.9 |
| 3215 | miR-21 | 8 | 5′-TCTGATAA-3′ | 56.0 |
| 3216 | miR-21 | 8 | 5′-ATCAGTCT-3 | 72.0 |
| 3217 | miR-21 | 8 | 5′-TCAACATC-3 | 48.0 |

[0437] Conclusion: The Tₘ values along with experimental data obtained with luciferase reporters show that potent antagonism by LNA-antimiR is not only dependent on Tₘ but also depends on the positioning of the LNA-antimiR within the microRNA recognition sequence.

### Materials and Methods:

[0438] Tₘ measurements: The oligonucleotide:miR-21 RNA duplexes were diluted to 3 μM in 500 μl RNase free H₂O and mixed with 500 μl 2× Tₘ-buffer (200 mM NaCl, 0.2 mM EDTA, 20 mM Na-phosphate, pH 7.0). The solution was heated to 95° C. for 3 min and then allowed to anneal in RT for 30 min. The duplex melting temperatures (Tₘ) were measured on a Lambda 40 UV/VIS Spectrophotometer equipped with a Peltier temperature programmer PTP6 using PE Templab software (Perkin Elmer). The temperature was ramped up from 20° C. to 95° C. and then down to 25° C., recording absorption at 260 nm. First derivative and the local maximums of both the melting and annealing were used to assess the duplex melting temperatures.

### Example 21

### Assessment of miR-21 Antagonism by Comparing an 8-mer (SEQ ID #3205) Versus a 15-mer (SEQ ID #3204) LNA-AntimiR in Human Hepatocytic Cell Line HepG2

[0439] We have previously shown in this application, that an 8-mer LNA-antimiR that is fully LNA-modified and phosphorothiolated effectively antagonizes miR-21 in the human cervix carcinoma cell line HeLa, the human breast carcinoma cell line MCF-7 and the human prostate cancer cell line PC3. We extended this screening approach to the human hepatocellular cancer cell line HepG2. To assess the efficiency of the 8-mer LNA-antimiR oligonucleotide against miR-21, luciferase reporter constructs were generated in which a perfect match target site for the mature miR-21 was cloned into the 3′UTR of the Renilla luciferase gene. In order to monitor miR-21 inhibition, HepG2 cells were transfected with the luciferase constructs together with the miR-21 antagonist SEQ ID #3205 (8-mer) and for comparison of specificity with the 8-mer LNA-antimiR mismatch (SEQ ID #3218) and for comparison of potency together with the 15-mer (SEQ ID #3204) at varying concentrations. After 24 hours, luciferase activity was measured.

[0440] Results: The luciferase reporter experiments showed a dose-dependent de-repression of the luciferase miR-21 reporter activity with the 15-mer LNA-antimiR against miR-21 (SEQ ID #3204). However, complete de-repression of the luciferase reporter was not obtained, not even at the higher concentrations (FIG. 20). In contrast, the cells that were transfected with the 8-mer fully LNA modified LNA-antimiR (SEQ ID #3205) showed complete de-repression already at 5 nM, indicating significantly improved potency compared to the 15-mer LNA-antimiR. Comparing the specificity of the 8-mer perfect match and the 8-mer mismatch, the mismatch LNA-antimiR (SEQ ID #3218) did not show any de-repression at all, demonstrating high specificity of the LNA-antimiR compound against miR-21.

[0441] Conclusion: The 8-mer (SEQ ID #3205) is more potent than the 15-mer LNA-antimiR in targeting miR-21 and antagonism of miR-21 by SEQ ID #3205 is specific.

### Materials and Methods:

[0442] Cell line: The human hepatocytic HepG2 cell line was purchased from ECACC (#85011430). HepG2 cells were cultured in EMEM medium, supplemented with 10% fetal bovine serum, 2 mM Glutamax and 25 ug/ml Gentamicin.

[0443] Transfection: 650,000 cells were seeded per well in a 6-well plate and reverse transfection were performed. HepG2 cells were transfected with 0.6 μg miR-21 or empty psiCHECK2 vector together with 2.55 μl Lipofectamine-2000 (Invitrogen) according to manufacturer's instructions. Transfected was also varying concentrations of LNA-antimiRs. After 24 hours, cells were harvested for luciferase measurements.

[0444] Luciferase assay: The cells were washed with PBS and 300 μl 1× Passive Lysis Buffer (Promega) was added to the wells. The plates were placed on a shaker for 30 min., after which the cell lysates were transferred to eppendorf tubes. The cell lysate was centrifugated for 10 min at 2.500 rpm after which 50 μl were transferred to a 96 well plate and luciferase measurements were performed according to the manufacturer's instructions (Promega).

### Example 22

### Validation of Interaction of the miR-21 Target Site in the Pdcd4 3″UTR and miR-21 using the 8-mer SEQ ID #3205 LNA-AntimiR in Human Hepatocellular Cell Line Huh-7

[0445] The tumour suppressor protein Pdcd4 inhibits tumour promotion and progression. Furthermore, downregulation of Pdcd4 in lung and colorectal cancer has also been associated with poor patient prognosis. Recently, Asangani et al (Oncogene 2007) and Frankel et al (J Biol Chem 2008) showed that the Pdcd4 3″LITR contains a conserved target site for miR-21, and transfecting cells with an antimiR-21, resulted in an increase in Pdcd4 protein. We therefore constructed a luciferase reporter plasmid, harboring 313 nt of the 3″UTR region of Pdcd4 encompassing the aforementioned miR-21 target site, which was co-transfected together with different LNA-antimiRs and pre-miR-21 (10 nM) into Huh-7 cells. The different LNA-antimiRs were; SEQ ID #3205 (8-mer, perfect match), SEQ ID #3218 (8-mer, mismatch) and SEQ ID #3204 (15-mer, DNA/LNA mixmer). Luciferase measurements were performed after 24 hours.

[0446] Results: As shown in FIG. 21, cells transfected with the Pdcd4 3′UTR luciferase reporter and SEQ ID #3205, an increase in luciferase activity was observed, indicating interaction between the Pdcd4 3″UTR and miR-21. However, transfecting the cells with the mismatch compound, SEQ ID #3218, no change in luciferase activity was observed, which was expected since the compound does not antagonize miR-21. When comparing the 8-mer LNA-antimiR against the 15-mer LNA-antimiR (SEQ ID #3204), the short fully LNA-modified and phosphorothiolated LNA-antimiR was significantly more potent, confirming previous data.

### Materials and Methods:

[0447] Cell line: The human hepatoma cell line Huh-7 was a kind gift from R. Bartinschlager (Dept Mol Virology, University of Heidelberg). Huh-7 cells were cultured in DMEM medium, supplemented with 10% fetal bovine serum, 2 mM Glutamax, 1×NEAA and 25 ug/ml Gentamicin.

[0448] Transfection: 11,000 cells were seeded per well in a 96-well plate the day before transfection in order to achieve 50-70% confluency the next day. On the day of transfection, Huh-7 cells were transfected with 20 ng Pdcd4 3″UTR/psiCHECK2 or empty psiCHECK2 vector together with 10 nM pre-miR-21 (Ambion) and 0.14 μl Lipofectamine-2000 (Invitrogen) according to the manufacturer's instructions. Varying concentrations of the LNA-antimiR oligonucleotides were also transfected. After 24 hours, cells were harvested for luciferase measurements.

[0449] Luciferase assay: Cells were washed and 30 μl 1× Passive Lysis Buffer (Promega) was added to each well, after which the 96-well plates was put on an orbital shaker. After 30 min., 50 μl luciferase substrate dissolved in Luciferase Assay Buffer II (Dual-Luciferase Reporter Assay System from Promega, Cat# E1910) was added to the wells with lysated cells and luciferase measurements were performed according to the manufacturer's instructions (Promega).

### Example 23

### Assessment of Pdcd4 Protein Levels as a Functional Readout for miR-21 Antagonism by the 8-mer LNA-AntimiR (SEQ ID #3205)

[0450] In addition, we also transfected HeLa cells with SEQ ID #3205 (perfect match), SEQ ID #3218 (mismatch), SEQ ID #3219 (scrambled) and analyzed Pdcd4 protein levels after 24 hours with Western blot (FIG. 22). As shown, in the protein extracts from cells where SEQ ID #3205 had been added, the Pdcd4 protein levels increase, due to antagonism of mir-21 by SEQ ID #3205 in contrast to the two control LNA oligonucleotides.

[0451] Conclusion: Antagonism of miR-21 using an 8-mer (SEQ ID #3205) leads to derepression of the direct target Pdcd4 ntagonism of miR-21

### Materials and Methods:

[0452] Cell line: The human cervix carcinoma cell line HeLa was purchased from ECACC (#93021013). HeLa cells were cultured in EMEM medium, supplemented with 10% fetal bovine serum, 2 mM Glutamax, 1×NEAA and 25 ug/ml Gentamicin.

[0453] Transfection: 200,000 cells were seeded per well in a 6-well plate the day before transfection in order to receive 50-70% confluency the next day. On the day of transfection, HeLa cells were transfected with 5 nM LNA oligonucleotides and 2.5 μg/ml Lipofectamine-2000 (Invitrogen) according to the manufacturer's instructions. After 24 hours, cells were harvested for Western blot analysis.

[0454] Western blot: Cells were washed with PBS, trypsinated, transferred to eppendorf tubes and 50 μl lysis buffer (1×RIPA) was added. The cell lysate was placed on ice for 20 min and spinned at 10,000 rpm for 10 minutes. Equal amounts (15 μl cell lysate) were loaded onto a 4-12% BIS-TRIS gel. The proteins were transferred to a nitrocellulose membrane using iBlot (Invitrogen) according to manufacturers instructions. The membrane was incubated overnight at 4° C. with the primary affinity purified rabbit serum antibody Pdcd4 (Rockland) with a 1:2000 concentration. As control, anti-beta tubulin antibodies (Thermo Scientific) were used at a 1:5000 dilution. Immunoreactive bands were visualized with ECL Plus (Amersham).

### Example 24

### Assessment of Potential Hepatotoxicity of the 8-mer Perfect Match LNA-AntimiR SEQ ID #3205 and the LNA Mismatch Control SEQ ID #3218

[0455] Each compound was injected into female NMRI mice, at doses of 25 mg/kg, 5 mg/kg and 1 mg/kg, every other day for 2 weeks. The animals were sacrificed and serum was collected from whole blood for ALT and AST analyses. As seen in FIG. 23, the ALT and AST levels were not elevated for SEQ ID #3205 compared to saline or SEQ ID #3218 (mismatch control). However, one mouse showed increased levels (marked red), since the serum samples were contaminated with red blood cells, which contain 6-8 times higher levels of ALT and AST compared to plasma. The mice that received 5 mg/kg and 1 mg/kg were also analyzed for ALT and AST levels and showed no changes compared to saline treated control animals (data not shown).

### Materials and Methods:

### Experimental Design:

| | | | | Conc. | | |
|---|---|---|---|---|---|---|
| Gr. | Animal | No. of | Compound | at dose vol. | | |
| no. | IDno. | mice | Dose level per day | 10 ml/mg | Adm. Route | Dosing |
| 1 | 1-10 | 10 | NaCl | — | i.v | 0, 2, 4, 7, 9 |
| | | | 0.9% | | | |
| 2 | 11-15 | 5 | SEQ ID # 3205 | 2.5 mg/ml | i.v | 0, 2, 4, 7, 9 |
| | | | 25 mg/kg | | | |
| 3 | 16-20 | 5 | SEQ ID # 3205 | 0.5 mg/ml | i.v | 0, 2, 4, 7, 9 |
| | | | 5 mg/kg | | | |
| 4 | 21-25 | 5 | SEQ ID # 3205 | 0.1 mg/ml | i.v | 0, 2, 4, 7, 9 |
| | | | 1 mg/kg | | | |
| 5 | 26-30 | 5 | SEQ ID # 3230 | 2.5 mg/ml | i.v | 0, 2, 4, 7, 9 |
| | | | 25 mg/kg | | | |
| 6 | 31-35 | 5 | SEQ ID # 3230 | 0.5 mg/ml | i.v | 0, 2, 4, 7, 9 |
| | | | 5 mg/kg | | | |

[0457] Sacrifice; The animals was sacrificed by cervical dislocation.

[0458] Sampling of serum for ALT/AST; The animals were anaesthetised with 70% CO₂-30% O₂ before collection of retro orbital sinus blood. The blood was collected into S-monovette Serum-Gel vials. The serum samples were harvested and stored from each individual mouse. The blood samples were stored at room temperature for two hours and thereafter centrifuged 10 min, 3000 rpm, at room temp. The serum fractions were harvested into Eppendorf tubes on wet ice.

[0459] ALT and AST measurements; ALT and AST measurements were performed in 96-well plates using ALT and AST reagents from ABX Pentra (A11A01627—ALT, A11A01629—AST) according to the manufacturer's instructions. In short, serum samples were diluted 2.5 fold with H₂O and each sample was assayed in duplicate. After addition of 50 μl diluted sample or standard (multical from ABX Pentra—A11A01652) to each well, 200 μl of 37° C. AST or ALT reagent mix was added to each well. Kinetic measurements were performed for 5 min with an interval of 30s at 340 nm and 37° C.

### Example 25

### Assessment of PU.1 Protein Levels as a Functional Readout for miR-155 Antagonism by Short LNA-AntimiR (SEQ ID #3207)

[0460] We have previously shown that the 8-mer (SEQ ID #3207) antagonizing miR-155 leads to derepression of the miR-155 target c/EBPbeta in the mouse macrophage RAW cells. To further verify the potency of SEQ ID #3207 we determined the protein levels of another miR-155 target, PU.1 As a functional readout for miR-155 antagonism by short LNA-antimiR (SEQ ID #3207) we performed Western blot. The antagonism was verified in the human monocytic THP-1 cell line which was transfected together with either an 8-mer (SEQ ID #3207) perfect match or a 8-mer control LNA in the absence or presence of pre-miR-155. LPS was used to induce miR-155 accumulation and cells were harvested after 24 hours.

[0461] Results: THP-1 cells that were transfected with pre-miR-155 shows a decrease in PU.1 levels (FIG. 24). Transfecting the cells with the fully LNA-modified and phosphorothiolated SEQ ID #3207 effectively antagonizes miR-155, leading to unaltered levels of PU.1 protein. By comparison, transfecting the cells with an 8-mer LNA control, PU.1 levels decreased, indicating that antagonism of miR-155 by SEQ ID #3207 LNA-antimiR is specific.

[0462] Conclusion: Antagonism of miR-155 using an 8-mer leads to de-repression of the direct target PU.1 in human THP-1 cells.

### Materials and Methods:

[0463] Cell line: The human monocytic THP-1 cell line was purchased from ECACC (#88081201). THP-1 cells were cultured in RPMI with L-glutamine, supplemented with 10% fetal bovine serum.

[0464] Transfection: 200,000 cells were seeded per well in a 12-well plate the day before. On the day of transfection, THP-1 cells were transfected with 5 nmol pre-miR-155 (Ambion) and/or 5 nM LNA-antimiR together with Lipofectamine-2000 (Invitrogen) according to the manufacturer's instructions. LPS (100 ng/ml) was added to the cells after the 4 hour incubation with the transfection complexes. After 24 hours, cells were harvested for protein extraction and western blot analysis.

[0465] Western blot: Cells were washed with PBS, trypsinated, transferred to eppendorf tubes and 50 μl lysis buffer (1×RIPA) was added. The cell lysate was placed on ice for 20 min and spinned at 10,000 rpm for 10 minutes. Equal amounts (15 μl cell lysate) were loaded onto a 4-12% BIS-TRIS gel. The proteins were transferred to a nitrocellulose membrane using iBlot (Invitrogen) according to manufacturers instructions The membrane was incubated overnight at 4° C. with the rabbit monoclonal PU.1 antibody (Cell Signaling) with a 1:2000 concentration. As equal loading, Tubulin (Thermo Scientific) was used at a 1:5000 dilution. Immunoreactive bands were visualized with ECL Plus (Amersham).

### Example 26

### Assessment of p27 Protein Levels as a Functional Readout for Antagonism of the miR-221/222 Family by the 7-mer SEQ ID #3225 LNA-AntimiR

[0466] Previous work has shown (Ie Sage et al. 2007, Galardi et al. 2007) that miR-221 and miR-222 post-transcriptionally regulate the expression of the tumour suppressor gene p27, which is involved in cell cycle regulation. In these studies, down-regulation of miR-221 and miR-222 was shown to increase expression levels of p27. Thus, as a functional readout for antagonism of the miR-221/222 family by the 7-mer SEQ ID #3225 LNA-antimiR we determined the protein levels of p27 after transfection of the LNA-antimiR SEQ ID #3225 into PC3 cells.

[0467] Results: As shown in FIG. 25, transfection of the 7-mer LNA-antimiR SEQ ID #3225 targeting the seed sequence of miR-221 and miR-222 resulted in dose-dependent increase of the p27 protein levels compared to either untransfected or our LNA scrambled control transfected PC3 cells. These results clearly demonstrate that the 7-mer LNA-antimiR is able to effectively antagonize the miR-221/222 family leading to de-repression of the direct target p27 at the protein level at concentrations as low as 5 nM.

[0468] Conclusion: A fully LNA-modified 7-mer LNA-antimiR targeting the seed sequence in the miR-221/222 family at 5 nM can effectively antagonize both miRNAs leading to de-repression of the direct target p27 at protein level.

### Materials and Methods:

[0469] Cell line: The human prostate carcinoma PC3 cell line was purchased from ECACC (#90112714). PC3 cells were cultured in DMEM medium, supplemented with 10% fetal bovine serum, 2 mM Glutamax and 25 ug/ml Gentamicin.

[0470] Transfection: 250,000 cells were seeded per well in a 6-well plate the day before transfection in order to receive 50% confluency the next day. On the day of transfection, PC3 cells were transfected with LNA-oligonucleotides at varying concentrations (see FIG. 25) with Lipofectamine-2000. Cells were harvested after 24 hours for protein extraction and western blot analysis.

[0471] Western blot: Cells were washed with PBS, trypsinated, transferred to eppendorf tubes and 50 μl lysis buffer (1×RIPA) was added. The cell lysate was placed on ice for 20 min, then spinned at 10.000 rpm for 10 minutes. Equal amounts (15 μl cell lysate) were loaded onto a 4-12% BIS-TRIS gel. The proteins were transferred to a nitrocellulose membrane using iBlot (Invitrogen) according to manufacturers instructions. The membrane was incubated overnight at 4° C. with the primary monoclonal mouse antibody p27 (BD Biosciences) at a 1:1000 dilution. As loading control, Tubulin (Thermo Scientific) was used at a 1:5000 dilution. Immunoreactive bands were visualized with ECL Plus (Amersham).

### Example 27

### Knock-Down of miR-221/222 by the 7-mer SEQ ID #3225 LNA-AntimiR Reduces Colony Formation of PC3 Cells

[0472] A hallmark of cellular transformation is the ability for tumour cells to grow in an anchorage-independent way in semisolid medium. We have therefore performed soft agar assay which is a phenotypic assay that is relevant for cancer, given that it measures the decrease of tumour cells. We transfected SEQ ID #3225 (perfect match) and SEQ ID #3231 (scrambled) into PC3 cells, and after 24 hours plated cells in soft agar. Colonies were counted after 12 days. We show in FIG. 26 that inhibition of miR-221 and miR-222 by SEQ ID #3225 can reduce the amount of colonies growing in soft agar compared to the scrambled control LNA-antimiR, indicating decrease of tumour cells.

[0473] Conclusion: The 7-mer (SEQ ID #3225) targeting the miR-221/222 family reduces the number of colonies in soft agar, indicating proliferation arrest of PC3 cells.

### Materials and Methods:

[0474] Cell line: The human prostate carcinoma PC3 cell line was purchased from ECACC (#90112714). PC3 cells were cultured in DMEM medium, supplemented with 10% fetal bovine serum, 2 mM Glutamax and 25 ug/ml Gentamicin.

[0475] Transfection: 250,000 cells were seeded per well in a 6-well plate the day before transfection in order to receive 50% confluency the next day. On the day of transfection, PC3 cells were transfected with 25 nM of different LNA oligonucleotides with Lipofectamine-2000.

[0476] Clonogenic growth in soft agar: 2.5×10³ PC3 cells were seeded in 0.35% agar on the top of a base layer containing 0.5% agar. Cells were plated 24 hours after transfection. Plates were incubated in at 37° C., 5% CO₂ in a hunified incubator for 12 days and stained with 0.005% crystal violet for 1 h, after which cells were counted. The assay was performed in triplicate.

### Example 28

### Assessment of let-7 Antagonism by 6-9-mer LNA-AntimiRs in Huh-7 Cells Transfected with let-7a Precursor miRNA, and a Luciferase Sensor Assay

[0477] In order to assess the efficiency of fully LNA-modified 6-9-mer oligonucleotides in targeting and antagonizing the let-7 family of miRNAs, a luciferase sensor construct was made, containing some 800 by of the HMGA2 3′UTR. The sequence cloned into the vector contains four out of seven functional let-7 binding sites (sites 2-5), as previously demonstrated by Mayr et al. (Science, 2007) and Lee and Dutta (Genes Dev, 2007). In order to monitor let-7 inhibition, the hepatocellular carcinoma cell line Huh-7 (with low to non-existing levels of endogenous let-7) was transfected with the luciferase sensor construct, with let-7a precursor miRNA, and with the 6-9 mer let-7 antagonists SEQ ID #3232, -3233, -3227, -3234, -3235; see FIG. 27) at increasing concentrations. The 6-9-mer LNA-antimiRs were compared with SEQ ID #3226, a 15-mer against let-7a as a positive control. After 24 hours, luciferase activity was measured.

[0478] Results: As seen in FIG. 28, the fully LNA-modified 8- and 9-mer LNA-antimiRs (SEQ ID #3227, SEQ ID #3234, and SEQ ID #3235) show similar potencies in de-repressing the let-7 targets in the luciferase sensor assay, as the positive control 15-mer SEQ ID #3226. Full target de-repression for these highly potent compounds is achieved already at 1-5 nM, whereas the 7-mer SEQ ID #3233 needs to be present at slightly higher concentrations (10 nM) to generate the same effect. However, the 6-mer SEQ ID #3232 shows no effect even at as high concentrations as 50 nM. The de-repression of luciferase activity by the 7-9- and the 15-mer LNA-antimiRs is dose-dependent, which is particularly clear in the case of the slightly less potent SEQ ID #3233.

[0479] Conclusion: To conclude, the 8-9-mer LNA-antimiRs (SEQ ID #3227, SEQ ID #3234, and SEQ ID #3235) show equal antagonist potencies in inhibition of let-7a in vitro compared to the 15-mer LNA-antimiR SEQ ID #3226 targeting let-7a. A potent effect, albeit at slightly higher concentrations is also seen for the 7-mer SEQ ID #3233, whereas a 6-mer has no effect at tested concentrations.

### Materials and Methods:

[0480] Cell line: The hepatocellular carcinoma cell line Huh-7 was a kind gift from R. Bartinschlager (Dept Mol Virology, University of Heidelberg).Huh-7 cells were cultured in DMEM medium, supplemented with 10% fetal bovine serum, 2 mM Glutamax, 1×NEAA and 25 ug/ml Gentamicin.

[0481] Transfection: 8,000 cells were seeded per well in a 96-well plate the day before transfection in order to receive 60-80% confluency the next day. On the day of transfection, Huh-7 cells in each well were transfected with 20 ng HMGA2 3′UTR/psiCHECK2 plasmid, let-7a precursor miRNA (Dharmacon; 10 nM end-concentration), LNA-antimiRs SEQ ID #3232, -3233, -3227, -3234, -3235, -3226; 0-50 nM end concentrations) together with 0.17 μl Lipofectamine-2000 (Invitrogen) according to manufacturer's instructions. After 24 hours, cells were harvested for luciferase measurements.

[0482] Luciferase assay: Growth media was discarded and 30 μl 1× Passive Lysis Buffer (Promega) was added to each well. After 15-30 minutes of incubation on an orbital shaker, renilla and firefly luciferase measurements were performed according to manufacturer's instructions (Promega).

### Example 29

### Assessment of Entire let-7 Family Antagonism by 8-, and 15-mer LNA-AntimiRs in Huh-7 Cells Transfected with a Luciferase Sensor Assay

[0483] In order to assess the efficiency of a fully LNA-modified 8-mer oligonucleotide in antagonizing the entire let-7 family of miRNAs, the same luciferase sensor construct as described in the previous example was used. Again, Huh-7 cells (with low to non-existing levels of endogenous let-7) were transfected with the sensor construct, with one of the family-representative let-7a, let-7d, let-7e, or let-71 precursors, and with the antagonist SEQ ID #3227 at increasing concentrations. The 8-mer LNA-antimiR was compared to SEQ ID #3226, a 15-mer against let-7a as a positive and potent control. After 24 hours, luciferase activity was measured.

[0484] Results: As seen in FIG. 29 the fully LNA-modified 8-mer LNA-antimiRs (SEQ ID #3227) show similar potencies in de-repressing the various let-7 targets in the luciferase sensor assay, as the positive control 15-mer SEQ ID #3226. Nearly full target de-repression for the 8-mer is achieved already at 0.5-1 nM, except in the case with let-7e premiR (FIG. 29C), to which only 7 out of 8 nucleotides of SEQ ID #3227 hybridizes to the target. However, despite the terminal mismatch in this case, SEQ ID #3227 generates full target de-repression at 5 nM. The positive control 15-mer shows potent antagonism of all precursors and gives nearly full de-repression at 0.5 nM. The de-repression of luciferase activity by both the 8- and the 15-mer LNA-antimiRs is clearly dose-dependent, as seen in all four panels (FIG. 29A-D).

[0485] Conclusion: To conclude, the 8-mer LNA-antimiR (SEQ ID #3227), is a potent antagonist against four representative let-7 family members in vitro, and thus likely against the entire family. Compared to a 15-mer positive control antagonist, SEQ ID #3226, the 8-mer is equally potent for three of four targets, and slightly less potent for the fourth target, let-7e, explained by a terminal mismatch in this case.

### Materials and Methods:

[0486] Cell line: The hepatocellular carcinoma cell line Huh-7 was a kind gift from R. Bartinschlager (Dept Mol Virology, University of Heidelberg). Huh-7 cells were cultured in DMEM medium, supplemented with 10% fetal bovine serum, 2 mM Glutamax, 1×NEAA and 25 ug/ml Gentamicin.

[0487] Transfection: 8,000 cells were seeded per well in a 96-well plate the day before transfection in order to receive 60-80% confluency the next day. On the day of transfection, Huh-7 cells in each well were transfected with 20 ng HMGA2 3′UTR/psiCHECK2 plasmid, with let-7a, -7d, -7e, or -7i precursor miRNA (Dharmacon; 10 nM end-concentration), and with LNA-antimiRs SEQ ID #3227 and SEQ ID #3226; 0-50 nM end concentrations) together with 0.17 μl Lipofectamine-2000 (Invitrogen) according to manufacturer's instructions. After 24 hours, cells were harvested for luciferase measurements.

[0488] Luciferase assay: Growth medium was discarded and 30 μl 1× Passive Lysis Buffer (Promega) was added to each well. After 15-30 minutes of incubation on an orbital shaker, renilla and firefly luciferase measurements were performed according to manufacturer's instructions (Promega).

### Example 30

### Assessment of Endogenous let-7 Antagonism by SEQ ID #3227, an 8-mer LNA-AntimiRs, in HeLa Cells Transfected with a Luciferase Sensor Assay

[0489] In order to determine the efficiency of a fully LNA-modified 8-mer oligonucleotide in targeting and antagonizing endogenous let-7, the same luciferase sensor construct as described in previous two examples, was co-transfected with SEQ ID #3227 into the cervical cancer cell line HeLa (that expresses moderate to high levels of let-7 as determined by Q-PCR; data not shown). Empty psiCHECK-2 vector was included as a negative control.

[0490] Results: As seen in FIG. 30, the fully LNA-modified 8-mer LNA-antimiR SEQ ID #3227 shows potent antagonism of endogenous let-7, and gives full target de-repression at concentrations of 5-10 nM. The de-repression of luciferase activity is dose-dependent, starting around 1 nM and reaching a plateau at approximately 10 nM.

[0491] Conclusion: To conclude, the 8-mer LNA-antimiR (SEQ ID #3227), is a potent antagonist against also endogenous let-7 in vitro, and thus provides definite evidence that entire miRNA families can be successfully targeted by short and fully LNA-modified antagonists.

### Materials and Methods:

[0492] Cell line: The cervical cancer cell line HeLa was purchased from ATCC (#CCL-2™). HeLa cells were cultured in Eagle's MEM medium, supplemented with 10% fetal bovine serum, 2 mM Glutamax, 1×NEAA and 25 ug/ml Gentamicin.

[0493] Transfection: 8,000 cells were seeded per well in a 96-well plate the day before transfection in order to receive 50-70% confluency the next day. On the day of transfection, HeLa cells in each well were co-transfected with 20 ng HMGA2 3′UTR/psiCHECK2 plasmid or psiCHECK-2 (empty vector), and with LNA-antimiR SEQ ID #3227 (0-50 nM, end concentrations) together with 0.17 μl Lipofectamine-2000 (Invitrogen) according to manufacturer's instructions. After 24 hours, cells were harvested for luciferase measurements.

[0494] Luciferase assay: Growth media was discarded and 30 μl 1× Passive Lysis Buffer (Promega) was added to each well. After 15-30 minutes of incubation on an orbital shaker, renilla and firefly luciferase measurements were performed according to manufacturer's instructions (Promega).

### Example 31

### Assessment of miR-21 Antagonism by an 8-mer LNA-AntimiR-21 (#3205) Versus an 8-mer (#3219) Scrambled Control LNA in the Human Colon Carcinoma Cell Line HCT116

[0495] We have previously shown in this application, that an 8-mer LNA-antimiR that is fully LNA-modified and phosphorothiolated effectively antagonizes miR-21 in the human cervix carcinoma cell line HeLa, the human breast carcinoma cell line MCF-7, the human prostate cancer cell line PC3 and human hepatocellular carcinoma HepG2 cell line. We extended this screening approach to the human colon carcinoma cell line HCT116. To assess the efficiency of the 8-mer LNA-antimiR oligonucleotide against miR-21, luciferase reporter constructs were generated in which a perfect match target site for the mature miR-21 was cloned into the 3′UTR of the Renilla luciferase gene. In order to monitor miR-21 inhibition, HCT116 cells were transfected with the luciferase constructs together with the miR-21 antagonist #3205 (8-mer) and for comparison of specificity with the 8-mer LNA scrambled control (#3219). After 24 hours, luciferase activity was measured.

[0496] Results: The luciferase reporter experiments showed a dose-dependent de-repression of the luciferase miR-21 reporter activity with the 8-mer LNA-antimiR against miR-21 (#3205) and complete de-repression was obtained at 5 nM (FIG. 31). When comparing the specificity of the 8-mer perfect match and the 8-mer scrambled control, the scrambled control LNA-antimiR (#3219) did not show any de-repression at all, demonstrating high specificity of the LNA-antimiR compound against miR-21.

[0497] Conclusion: The 8-mer (#3205) is potent in targeting miR-21 and antagonism of miR-21 by #3205 is specific.

### Materials and Methods:

[0498] Cell line: The human colon carcinoma HCT116 cell line was purchased from ATCC(CCL-247). HCT116 cells were cultured in RPMI medium, supplemented with 10% fetal bovine serum, and 25 ug/ml Gentamicin.

[0499] Transfection: 110,000 cells were seeded per well in a 12-well plate and transfection was performed. HCT116 cells were transfected with 0.3 μg miR-21 luciferase sensor plasmid or empty psiCHECK2 vector together with 1.2 μl Lipofectamine-2000 (Invitrogen) according to the manufacturer's instructions. Transfected were also varying concentrations of LNA-antimiR and control oligonucleotides. After 24 hours, cells were harvested for luciferase measurements.

[0500] Luciferase assay: The cells were washed with PBS and 250 μl 1× Passive Lysis Buffer (Promega) was added to the wells. The plates were placed on a shaker for 30 min., after which the cell lysates were transferred to eppendorf tubes. The cell lysate was centrifugated for 10 min at 2.500 rpm after which 50 μl were transferred to a 96 well plate and luciferase measurements were performed according to the manufacturer's instructions (Promega).

### Example 32

### Knock-Down of miR-21 by the 8-mer #3205 LNA-AntimiR Reduces Colony Formation of PC3 cells

[0501] A hallmark of cellular transformation is the ability for tumour cells to grow in an anchorage-independent way in semisolid medium. We therefore performed soft agar assay which is a phenotypic assay that is relevant for cancer, given that it measures the decrease of tumour cells. We transfected #3205 (perfect match LNA-antimiR-21) and #3219 (LNA scrambled control) into PC3 cells, and after 24 hours plated cells in soft agar. Colonies were counted after 12 days. We show in FIG. 32 that inhibition of miR-21 by #3205 can reduce the amount of colonies growing in soft agar compared to the scrambled control LNA treated or untreated control (transfected, but with no LNA), demonstrating decrease of tumour cells.

[0502] Conclusion: The 8-mer (#3205) targeting the miR-21 family reduces the number of colonies in soft agar, demonstrating proliferation arrest of PC3 cells.

### Materials and Methods:

[0503] Cell line: The human prostate carcinoma PC3 cell line was purchased from ECACC (#90112714). PC3 cells were cultured in DMEM medium, supplemented with 10% fetal bovine serum, 2 mM Glutamax and 25 ug/ml Gentamicin.

[0504] Transfection: 250,000 cells were seeded per well in a 6-well plate the day before transfection in order to receive 50% confluency the next day. On the day of transfection, PC3 cells were transfected with 25 nM of different LNA oligonucleotides with Lipofectamine-2000.

[0505] Clonogenic growth in soft agar: 2.5×10³ PC3 cells were seeded in 0.35% agar on the top of a base layer containing 0.5% agar. Cells were plated 24 hours after transfection. Plates were incubated in at 37° C., 5% CO₂ in a hunified incubator for 12 days and stained with 0.005% crystal violet for 1 h, after which cells were counted. The assay was performed in triplicate.

### Example 33

[0506] Silencing of miR-21 by the 8-mer #3205 LNA-antimiR reduces colony formation of HepG2 cells. miR-21 is overexpressed in the human hepatocellular carcinoma cell line HepG2 and we have previously shown that we are able to regulate the luciferase activity of a miR-21 sensor plasmid with #3205 in these cells. HepG2 cells were transfected with #3205 and #3219 (scrambled 8-mer), and after 24 hours plated into soft agar. Colonies were counted after 17 days with a microscope.

[0507] Results: We show in FIG. 33 that inhibition of miR-21 by #3205 can reduce the amount of colonies growing in soft agar, showing that proliferation arrest has occurred. In addition, our scrambled 8-mer control, #3219, had no significant effect on the number of colonies.

[0508] Conclusion: The 8-mer (#3205) targeting the miR-21 reduces the number of colonies in soft agar, indicating proliferation arrest of HepG2 cells.

### Materials and Methods:

[0509] Cell line: The human hepatocytic HepG2 cell line was purchased from ECACC (#85011430). HepG2 cells were cultured in EMEM medium, supplemented with 10% fetal bovine serum, 2 mM Glutamax and 25 ug/ml Gentamicin.

[0510] Transfection: 650,000 cells were seeded per well in a 6-well plate and reverse transfection was performed. HepG2 cells were transfected with 0.6 μg miR-21 luciferase sensor plasmid or empty psiCHECK2 vector together with 2.55 μl Lipofectamine-2000 (Invitrogen) according to the manufacturer's instructions. Transfected were also LNA-antimiR and control oligonucleotides as varying concentrations. After 24 hours, the cells were harvested for luciferase measurements.

[0511] Clonogenic growth in soft agar: 2.0×10³ HepG2 cells were seeded in 0.35% agar on the top of a base layer containing 0.5% agar. Cells were plated 24 hours after transfection. Plates were incubated in at 37° C., 5% CO₂ in a hunified incubator for 17 days and stained with 0.005% crystal violet for 1 h, after which cells were counted. The assay was performed in triplicate.

### Example 34

### Silencing of miR-21 by the 8-mer #3205 LNA-AntimiR Inhibits Cell Migration in PC3 Cells

[0512] Cell migration can be monitored by performing a wound healing assay (=scratch assay) where a “scratch” is made in a cell monolayer, and images are captured at the beginning and at regular intervals during cell migration. By comparing the images, quantification of the migration rate of the cells can be determined. This was done in the human prostate cancer cell line PC3. Cells were seeded, and on day 3 the cells were transfected, and the next day, when 100% confluency was reached, a scratch (=wound) was made. When the scratch was made, pictures were taken in order to document the initial wound. Afterwards the area of the wound closure is measured at different time points with the free software program Image J. As shown in FIG. 34A, PC3 cells had been treated with 25 nM #3205 (perfect match, miR-21), the control #3219 or left untransfected. Pictures were taken after 24 hours, and the area was calculated for the wound closure at respective time-point. The wound closure for the untransfected cells and for the control, #3219, was faster as compared to our LNA-antimiR against miR-21, #3205, indicating that #3205 inhibits miR-21 and prevents the cells from migrating (FIG. 34B).

[0513] Conclusion: The 8-mer (#3205) targeting miR-21 inhibits the cell migration of PC3 cells compared to untransfected and control transfected cells.

### Materials and Methods:

[0514] Cell line: The human prostate carcinoma PC3 cell line was purchased from ECACC (#90112714). PC3 cells were cultured in DMEM medium, supplemented with 10% fetal bovine serum, 2 mM Glutamax and 25 ug/ml Gentamicin.

[0515] Scratch assay: 150,000 cells were seeded per well in a 6-well plate three days before transfection in order to receive 100% confluency the next day. At 24 hours after transfection, a scratch was made in the cell monolayer with a 200 μl tip. Pictures were taken at 0 h and after 24 hours by using a digital camera coupled to a microscope. The software program Image J was used to determine wound closure.

### Example 35

### Length Assessment of Fully LNA-Substituted LNA-AntimiRs Antagonizing miR-155

[0516] We have previously shown a length assessment for miR-21 regarding fully LNA-substituted LNA-antimiRs, and showed that the most potent LNA-antimiRs are 7-, 8- or 9 nt in length. The same experiment was repeated with miR-155. A perfect match target site for miR-155 was cloned into the 3′UTR of the luciferase gene in the reporter plasmid psiCHECK2 and transfected into the mouse RAW macrophage cell line together with fully LNA-substituted LNA-antimiRs of different lengths. Because the endogenous levels of miR-155 are low in the RAW cell line, the cells were treated with 100 ng/ml LPS for 24 hours in order to induce miR-155 accumulation. After 24 hours, luciferase analysis was performed.

[0517] Results: As shown in FIG. 35, the most potent LNA-antimiRs are #3207(8 nt) and #3241 (9 nt), reaching almost a 80% de-repression at only 0.25 nM LNA concentration. The 6-mer (#3244) shows no significant de-repression. Increasing the length to 12-mer to 14-mer (#3242 and #3243) decreased the potency as shown by less efficient de-repression of the miR-155 reporter.

[0518] Conclusion: The most potent fully LNA-substituted LNA-antimiRs targeting miR-155 were an B- and 9-mer (#3207 and #3241).

### Materials and Methods:

[0519] Cell line: The mouse macrophage RAW 264.7 cell line was purchased from ATCC (TIB-71). RAW cells were cultured in DMEM medium, supplemented with 10% fetal bovine serum, 4 mM Glutamax and 25 ug/ml Gentamicin.

[0520] Transfection: 500.000 cells were seeded per well in a 6-well plate the day before transfection in order to receive 50% confluency the next day. On the day of transfection, RAW 264.7 cells were transfected with 0.3 ug miR-155 perfect match/psiCHECK2 or empty psiCHECK2 vector together with 10 μl Lipofectamine-2000 (Invitrogen) according to the manufacturer's instructions. Transfected was also varying concentrations of LNA-antimiRs. In order to induce miR-155 accumulation, LPS (100 ng/ml) was added to the RAW cells after the 4 hour incubation with the transfection complexes. After another 24 hours, cells were harvested for luciferase measurements.

[0521] Luciferase assay: The cells were washed with PBS and harvested with cell scraper, after which cells were spinned for 5 min at 2.500 rpm. The supernatant was discarded and 50 μl 1× Passive Lysis Buffer (Promega) was added to the cell pellet, after which cells were put on ice for 30 min. The lysed cells were spinned at 10.000 rpm for 30 min after which 20 μl were transferred to a 96-well plate and luciferase measurements were performed according to the manufacturer's instructions (Promega).

### Example 36

### Plasma Protein Binding for the Fully LNA-Substituted 8-mer #3205 Targeting miR-21 (LNA-AntimiR-21)

[0522] The plasma proteins are not saturated with #3205 at the plasma concentrations in the experiment shown in FIG. 36A. In a wide range of #3205 concentrations in the plasma the protein binding is around 95% of the #3205 LNA-antimiR-21 in FIG. 36B. At #3205 concentrations 50.1 μM (174 μg/mL) the binding capacity of plasma proteins for FAM-labeled #3205 has not been saturated.

[0523] Materials and Methods: Mouse plasma (100 μL) was spiked with FAM-labeled #3205 to 0.167, 1.67, 5.01, 10.02, 16.7, 25.05 and 50.1 μM concentrations. The solutions were incubated at 37° C. for 30 minutes. The solutions were transferred to a Microcon Ultracel YM-30 filter (regenerated cellulose 30,000 MWCO). The filters were spun for 20 minutes at 2000 g and at room temperature in a microcentrifuge. The filtrate was diluted 5, 10 and 20 times and 100 μL samples were transferred to a microtiter plate (Polystyrene Black NUNC-237108). The fluorescence was detected using a FLUOstar Optima elisa reader with excitation 458 nm and emission 520 nm. The amount of unbound FAM-labeled #3205 was calculated from a standard curve derived from filtrated plasma spiked with FAM-labeled #3205 at 12 different (0.45-1000 nM) concentrations. The numbers were corrected with the recovery number established from filtration experiments with #3205 concentrations 0.167, 1.67, 5.01, 10.02, 16.7, 25.05 and 50.1 μM in filtrated plasma. The recovery of FAM-labeled #3205 was 86%.

### Example 37

### Quantitative Whole Body Autoradiography Study in Female Pigmented Mice after Single Intravenous Administration of ³⁵S-Labelled #3205 LNA-AntimiR-21

[0524] In order to determine the biodistribution of a short fully LNA-modified LNA-antimiR (#3205, 8-mer) a whole body tissue distribution of radioactively labeled compound was done in mice. ³⁵S-labelled #3205 was dosed to mice with a single intravenous administration and mice were sacrificed at different time-points, ranging from 5 min to 21 days.

TABLE 6(i)
Individual tissue concentrations
(μg #3205/g tissue) after a single intravenous administration
of ³⁵S-labelled #3205 in female pigmented mice.

| | Max. Conc. | | |
|---|---|---|---|
| | of oligo μg | Time of max | |
| Tissue | #3205/g tissue | conc. hours | T½ hours |
| Adrenal gl. | 13.6 | 0.083 | 374 |
| Bile | 4 | 1 | |
| Bone marrow | 7.2 | 0.083 | 411 |
| Brain | 0.4 | 0.083 | |
| Brown fat | 8.8 | 0.083 | |
| Gastric muc. | 10.1 | 0.083 | |
| Heart blood | 26.2 | 0.083 | 10.3 |
| Kidney ctx. | 58.7 | 24 | 104 |
| Liver | 11.8 | 0.083 | 588 |
| | 10.7 | 24 | |
| Lung | 13.2 | 0.083 | 289 |
| Lymph node | 5 | 0.083 | 262 |
| | 2.4 | 48 | |
| Lymph | 18.8 | 4 | |
| | 20.8 | 168 | |
| Myocardium | 8.1 | 0.083 | 662 |
| Ovary | 13 | 0.083 | 198 |
| Pancreas | 5 | 0.083 | |
| Pituitary gl. | 6.7 | 0.083 | |
| Salivary gl. | 8.6 | 0.083 | 405 |
| | 5.5 | 168 | |
| skel. Muscle | 4.8 | 0.083 | |
| Skin pig. | 5.4 | 0.25 | |
| Spleen | 9.8 | 0.083 | 564 |
| Thymus | 3.8 | 0.083 | 185 |
| Thyroid gl. | 10.9 | 0.083 | 592 |
| Urine | 328.9 | 0.083 | |
| Uterus | 9.6 | 0.25 | 177 |
| Uvea of the eye | 13.6 | 0.083 | |
| LOQ | 0.045 | 0.083 | |
| | 0.033 | 24 | |
| | 0.03 | 168 | |

The figures are mean values of three measurements for each tissue and ratio. The coefficient of variation (CV) is generally about 10%.

TABLE 6(ii)
Tissue to liver ratios after single intravenous administration of ³⁵S-labelled
#3205 in female pigmented mice.
³⁵S-#3205

| | Animal no | | | | | | | | |
|---|---|---|---|---|---|---|---|---|---|
| | 10 | 11 | 12 | 13 | 14 | 15 | 16 | 17 | 18 |
| | Surv. Time (h) | | | | | | | | |
| Organ | 0.083 | 0.25 | 1 h | 4 h | 24 h | 48 h | 96 h | 168 | 504 |
| Adrenal gl | liver | liver | liver | liver | liver | liver | liver | liver | liver |
| Bile | 1.15 | 1.08 | 0.52 | 0.27 | 0.24 | 0.26 | 0.23 | 0.18 | 0.17 |
| Bone marrow | 0.03 | 0.11 | 0.55 | 0.10 | 0.03 | 0.07 | 0.04 | 0.03 | 0.04 |
| Brain | 0.61 | 0.81 | 0.55 | 0.45 | 0.40 | 0.48 | 0.43 | 0.42 | 0.34 |
| Brown fat | 0.03 | 0.03 | 0.01 | 0.00 | 0.00 | 0.00 | 0.00 | 0.00 | 0.00 |
| Gastric muc | 0.75 | 0.57 | 0.29 | 0.12 | 0.07 | 0.12 | 0.08 | 0.10 | 0.07 |
| Heart blood | 0.86 | 0.71 | 0.31 | 0.22 | 0.10 | 0.21 | 0.15 | 0.16 | 0.12 |
| Kidney ctx | 2.23 | 1.91 | 0.74 | 0.11 | 0.01 | 0.00 | 0.00 | 0.00 | 0.00 |
| Liver | 2.87 | 3.94 | 6.45 | 6.95 | 5.51 | 6.68 | 3.92 | 2.24 | 0.40 |
| Lung | 1.00 | 1.00 | 1.00 | 1.00 | 1.00 | 1.00 | 1.00 | 1.00 | 1.00 |
| Lymph node | 1.12 | 0.97 | 0.63 | 0.09 | 0.04 | 0.04 | 0.03 | 0.02 | 0.02 |
| Lymph | 0.43 | 0.30 | 0.25 | 0.19 | 0.11 | 0.32 | 0.20 | 0.17 | 0.12 |
| Myocardium | 0.82 | 1.09 | 1.78 | 2.78 | 1.03 | 2.05 | 1.62 | 3.17 | 1.89 |
| Ovary | 0.69 | 0.63 | 0.30 | 0.13 | 0.10 | 0.15 | 0.09 | 0.11 | 0.12 |
| Pancreas | 1.10 | 1.40 | 0.61 | 0.31 | 0.27 | 0.28 | 0.21 | 0.21 | 0.08 |
| Pituitary gland | 0.42 | 0.37 | 0.22 | 0.18 | 0.12 | 0.17 | 0.12 | 0.15 | 0.11 |
| Salivary gland | 0.57 | 0.54 | 0.28 | 0.11 | 0.15 | 0.16 | 0.12 | 0.10 | 0.08 |
| Skel. muscle | 0.73 | 0.81 | 0.38 | 0.25 | 0.25 | 0.42 | 0.23 | 0.85 | 0.24 |
| Skin, pigm. | 0.40 | 0.28 | 0.14 | 0.04 | 0.02 | 0.04 | 0.03 | 0.03 | 0.03 |
| Spleen | 0.34 | 0.69 | 0.65 | 0.36 | 0.20 | 0.26 | 0.20 | 0.19 | 0.13 |
| Thymus | 0.83 | 0.86 | 0.44 | 0.32 | 0.24 | 0.34 | 0.35 | 0.29 | 0.31 |
| Thyroid gland | 0.32 | 0.31 | 0.14 | 0.07 | 0.09 | 0.08 | 0.05 | 0.04 | 0.02 |
| Urine | 0.9 | 1.2 | 0.43 | 0.28 | 0.25 | 0.34 | 0.19 | 0.26 | 0.25 |
| Uterus | 27.96 | 39.48 | 9.90 | 5.44 | 0.24 | 0.39 | 0.12 | 0.15 | 0.03 |
| Uvea of the eye | 0.56 | 1.23 | 0.65 | 0.30 | 0.30 | 0.07 | 0.27 | 0.16 | 0.08 |

[0525] Conclusions: #3205 shows blood clearance of radioactivity with elimination half-lives of 8-10 hours. High levels of radioactivity were registered in the kidney cortex, lymph, liver, bone marrow, spleen, ovary and uterus. The highest level of radioactivity was registered in the kidney cortex showing five times higher levels than that of the liver for #3205. A strong retention of radioactivity was noticed in the kidney cortex, lymph, liver, bone marrow and spleen for #3205 LNA-antimiR-21.

### Materials and Methods:

[0526] Dose administration: All mice were weighed before administration. Nine female mice were given 10 mg/kg of ³⁵S-#3205 intravenously in a tail vein. The volume given to each animal was 10 mL/kg of the test formulation. The specific activity 75.7 μCi/mg. Individual mice were killed 5 min, 15 min, 1 hour, 4 hours, 24 hours, 2 days, 4 days, 7 days and 21 days after administration of #3205.Whole body autoradiography: The mice were anaesthetized by sevoflurane, and then immediately immersed in heptane, cooled with dry ice to −80° C., ABR-SOP-0130. The frozen carcasses were embedded in a gel of aqueous carboxymethyl cellulose (CMC), frozen in ethanol, cooled with dry ice (−80° C.) and sectioned sagittaly for whole body autoradiography, according to the standard method, ABR-SOP-0131. From each animal 20 μm sections were cut at different levels with a cryomicrotome (Leica CM 3600) at a temperature of about −20° C. The obtained sections were caught on tape (Minnesota Mining and Manufacturing Co., No. 810) and numbered consecutively with radioactive ink. After being freeze-dried at −20° C. for about 24 hours, selected sections were covered with a thin layer of mylar foil, and put on imaging plates (Fuji, Japan). Exposure took place in light tight cassettes in a lead shielding box at −20° C., to protect the image plates from environmental radiation. After exposure the imaging plates were scanned at a pixel size of 50 μm and analyzed by radioluminography using a bioimaging analysis system (Bas 2500, Fuji, Japan), and described in ABR-SOP-0214. A water-soluble standard test solution of ³⁵S radioactivity was mixed with whole blood and used for production of a calibration scale, ABR-SOP-0251. However, the different blood standards were dissolved in 500 uL Soluene-35. 4.5 mL Ultima Gold was then added to the dissolved samples. As ³⁵S and ¹⁴C have very similar energy spectra, a standard ¹⁴C-programme (Packard 2200CA) was used when the radioactivity for the different blood samples was settled.

[0527] Pharmacokinetic calculations: The ³⁵S radioactivity measured in whole blood and tissues was expressed as nCi/g tissue and recalculated to nmol equiv/g tissue for the pharmacokinetic evaluation. The pharmacokinetic parameters Cₘₐₓ, t_{1/2} and AUC were determined for the whole blood and tissues by non-compartmental analysis using WinNonlin Professional (Pharsight Corporation, Mountain View, Calif., USA). After intravenous administration, the concentration was extrapolated back to zero and expressed as (C₀). The elimination rate constant λ was estimated by linear regression analysis of the terminal slope of the logarithmic plasma concentration-time curve. The elimination half-life, t_{1/2}, was calculated using the equation, t_{1/2}=ln 2/λ. The last three time-points above LOQ were used in the elimination half-life calculations, if not stated otherwise.

### Example 38

### Assessment of Let-7 Inhibition In Vivo by an 8-mer LNA-AntimiR, as Determined Through Ras Protein Quantification in Mouse Lung and Kidney

[0528] In order to investigate the possibility to antagonize the abundantly expressed let-7 family in vivo, mice were intravenously (i.v.) injected with an 8-mer LNA-antimiR antagonist or with saline. To measure treatment effect, proteins were isolated from lungs and kidneys. Because the Ras family of proteins (N-Ras, K-Ras, and H-Ras), in particular N-Ras and K-Ras, has previously been shown to be regulated (repressed) by the let-7 family by Johnson et al. (Cell, 2005), the aim was to analyze whether these let-7 targets could be de-repressed in vivo.

[0529] Results: As seen in FIG. 37, the 8-mer LNA-antimiR potently de-repressed Ras protein levels in the kidneys of treated mice, normalized against saline controls. The up-regulation in this organ was more than 3-fold, showing a clear in vivo effect. In the lungs, however, only a minimal (1.2-fold) Ras de-repression was observed (FIG. 1B), suggesting that insufficient amounts of LNA-antimiR has entered this organ in order to inhibit its massive amounts of let-7, as previously described by Johnson et al. (Cancer Research, 2007).

[0530] Conclusion: The 8-mer LNA-antimiR shows a clear effect in regulating target let-7 miRNA in vivo, as evaluated based on Ras protein levels in treated vs. control mice. Whereas the effect seems to be smaller in lungs, Ras levels in the kidney show a substantial up-regulation upon antimiRs-treatment.

[0531] Materials and Methods: Animals and dosing: C57BL/6 female mice were treated with 10 mg/kg LNA-antimiR or saline for three consecutive days (0, 1, and 2) and sacrificed on day 4. Tissue samples from lungs and kidneys were snapfrozen and stored at −80° C. until further processing.

[0532] Western blot analysis: Lung and kidney proteins from saline and LNA-antimiR-treated mice were separated on NuPAGE Bis Tris 4-12% (Invitrogen), using 100 μg per sample. The proteins were transferred to a nitrocellulose membrane using iBlot (Invitrogen) according to the manufacturer's instructions. Blocking, antibody dilution and detection was performed according to the manufacturer's specifications. For Ras detection, a primary rabbit-anti Ras antibody (SC-3339, Santa Cruz Biotechnology) and a secondary HRP-conjugated swine-anti-rabbit antibody (P0399, Dako) was used, and for tubulin detection, a primary tubulin alpha (MS-581-P1, Neomarkers) and a secondary HRP-conjugated goat-anti-mouse antibody (P0447, Dako) was used.

### Example 40

### In Vivo Efficacy Assessment of the 8-mer LNA-AntimiR (#3205) in Targeting miR-21, as Determined by Pdcd4 Protein Up-Regulation in Mouse Kidney

[0533] We have shown that an 8-mer LNA-antimiR that is fully LNA-modified antagonizes miR-21 and has the ability to regulate the protein levels of the miR-21 target Pdcd4 in vitro. We therefore injected the LNA-antimiR into mice to determine the effects of the LNA-antimiR in vivo. The mice received 25 mg/kg of #3205 by i.v. injection every other day for 14 days (a total of 5 doses). The mice were sacrificed on day 14, the kidney was removed, and protein was isolated. In order to determine target regulation, Western blot analysis was performed.

[0534] Results: As shown in FIG. 37, treating mice with #3205 showed significantly increased Pdcd4 protein levels as compared to the saline control. While the normalized Pdcd4 versus Gapdh ratio was consistent in both saline samples, the protein up-regulation in the two LNA-antimiR-treated (#32059 mice were measured to 3.3- and 6.3-fold, respectively, demonstrating an in vivo pharmacological effect of the #3205 8-mer LNA-antimiR.

[0535] Conclusion: The fully LNA-modified 8-mer LNA-antimiR #3205 antagonizes miR-21 in vivo, as demonstrated through its ability to de-repress (up-regulate) mouse kidney levels of Pdcd4, a validated miR-21 target.

### Materials and Methods:

[0536] Animals and dosing: C57BL/6 female mice with average of 20 g body weight at first dosing were used in all experiments and received regular chow diet (Altromin no 1324, Brogaarden, Gentofte, Denmark). Substances were formulated in physiological saline (0.9% NaCl). The animals were dozed with LNA-antimiR or saline (0.9% NaCl), receiving an injection of 25 mg/kg every other day for 14 days, a total of 5 doses. Animals were sacrificed on day 14.

[0537] Western blot analysis: 80 μg kidney tissue from saline or LNA-treated mice was separated on NuPAGE Bis Tris 4-12% (Invitrogen). The proteins were transferred to a nitrocellulose membrane using iBlot (Invitrogen) according to the manufacturer's instructions. The membrane was incubated with Pdcd4 antibody (Bethyl Laboratories), followed by HRP-conjugated swine-anti-rabbit antibody (Dako). As equal loading control, GAPDH (Abcam) was used, followed by HRP-conjugated swine-anti-mouse antibody. The membranes were visualized by chemiluminiscence (ECL, Amersham).

TABLE 1

| | | | | | | | | |
|---|---|---|---|---|---|---|---|---|
| | | SEQ | | SEQ | | SEQ | | SEQ |
| | | ID | | ID | | ID | | ID |
| microRNA | MicroRNASequence | NO | 9-mer | NO | 8-mer | NO | 7-mer | NO |

| | | | | | | | | |
|---|---|---|---|---|---|---|---|---|
| ebv-miR-BART1-3p | UAGCACCGCUAUCCACUAUGUC | 40 | AGCGGTGCT | 977 | GCGGTGCT | 1914 | CGGTGCT | 2851 |
| ebv-miR-BART1-5p | UCUUAGUGGAAGUGACGUGCUGUG | 41 | TCCACTAAG | 978 | CCACTAAG | 1915 | CACTAAG | 2852 |
| ebv-miR-BART10 | UACAUAACCAUGGAGUUGGCUGU | 42 | TGGTTATGT | 979 | GGTTATGT | 1916 | GTTATGT | 2853 |
| ebv-miR-BART10* | GCCACCUCUUUGGUUCUGUACA | 43 | AAGAGGTGG | 980 | AGAGGTGG | 1917 | GAGGTGG | 2854 |
| ebv-miR-BART11-3p | ACGCACACCAGGCUGACUGCC | 44 | TGGTGTGCG | 981 | GGTGTGCG | 1918 | GTGTGCG | 2855 |
| ebv-miR-BART11-5p | UCAGACAGUUUGGUGCGCUAGUUG | 45 | AACTGTCTG | 982 | ACTGTCTG | 1919 | CTGTCTG | 2856 |
| ebv-miR-BART12 | UCCUGUGGUGUUUGGUGUGGUU | 46 | CACCACAGG | 983 | ACCACAGG | 1920 | CCACAGG | 2857 |
| ebv-miR-BART13 | UGUAACUUGCCAGGGACGGCUGA | 47 | GCAAGTTAC | 984 | CAAGTTAC | 1921 | AAGTTAC | 2858 |
| ebv-miR-BART13* | AACCGGCUCGUGGCUCGUACAG | 48 | CGAGCCGGT | 985 | GAGCCGGT | 1922 | AGCCGGT | 2859 |
| ebv-miR-BART14 | UAAAUGCUGCAGUAGUAGGGAU | 49 | GCAGCATTT | 986 | CAGCATTT | 1923 | AGCATTT | 2860 |
| ebv-miR-BART14* | UACCCUACGCUGCCGAUUUACA | 50 | GCGTAGGGT | 987 | CGTAGGGT | 1924 | GTAGGGT | 2861 |
| ebv-miR-BART15 | GUCAGUGGUUUUGUUUCCUUGA | 51 | AACCACTGA | 988 | ACCACTGA | 1925 | CCACTGA | 2862 |
| ebv-miR-BART16 | UUAGAUAGAGUGGGUGUGUGCUCU | 52 | CTCTATCTA | 989 | TCTATCTA | 1926 | CTATCTA | 2863 |
| ebv-miR-BART17-3p | UGUAUGCCUGGUGUCCCCUUAGU | 53 | CAGGCATAC | 990 | AGGCATAC | 1927 | GGCATAC | 2864 |
| ebv-miR-BART17-5p | UAAGAGGACGCAGGCAUACAAG | 54 | CGTCCTCTT | 991 | GTCCTCTT | 1928 | TCCTCTT | 2865 |
| ebv-miR-BART18-3p | UAUCGGAAGUUUGGGCUUCGUC | 55 | ACTTCCGAT | 992 | CTTCCGAT | 1929 | TTCCGAT | 2866 |
| ebv-miR-BART18-5p | UCAAGUUCGCACUUCCUAUACA | 56 | GCGAACTTG | 993 | CGAACTTG | 1930 | GAACTTG | 2867 |
| ebv-miR-BART19-3p | UUUUGUUUGCUUGGGAAUGCU | 57 | GCAAACAAA | 994 | CAAACAAA | 1931 | AAACAAA | 2868 |
| ebv-miR-BART19-5p | ACAUUCCCCGCAAACAUGACAUG | 58 | CGGGGAATG | 995 | GGGGAATG | 1932 | GGGAATG | 2869 |
| ebv-miR-BART2-3p | AAGGAGCGAUUUGGAGAAAAUAAA | 59 | ATCGCTCCT | 996 | TCGCTCCT | 1933 | CGCTCCT | 2870 |
| ebv-miR-BART2-5p | UAUUUUCUGCAUUCGCCCUUGC | 60 | GCAGAAAAT | 997 | CAGAAAAT | 1934 | AGAAAAT | 2871 |
| ebv-miR-BART20-3p | CAUGAAGGCACAGCCUGUUACC | 61 | TGCCTTCAT | 998 | GCCTTCAT | 1935 | CCTTCAT | 2872 |
| ebv-miR-BART20-5p | UAGCAGGCAUGUCUUCAUUCC | 62 | ATGCCTGCT | 999 | TGCCTGCT | 1936 | GCCTGCT | 2873 |
| ebv-miR-BART3 | CGCACCACUAGUCACCAGGUGU | 63 | TAGTGGTGC | 1000 | AGTGGTGC | 1937 | GTGGTGC | 2874 |
| ebv-miR-BART3* | ACCUAGUGUUAGUGUUGUGCU | 64 | AACACTAGG | 1001 | ACACTAGG | 1938 | CACTAGG | 2875 |
| ebv-miR-BART4 | GACCUGAUGCUGCUGGUGUGCU | 65 | GCATCAGGT | 1002 | CATCAGGT | 1939 | ATCAGGT | 2876 |
| ebv-miR-BART5 | CAAGGUGAAUAUAGCUGCCCAUCG | 66 | ATTCACCTT | 1003 | TTCACCTT | 1940 | TCACCTT | 2877 |
| ebv-miR-BART6-3p | CGGGGAUCGGACUAGCCUUAGA | 67 | CCGATCCCC | 1004 | CGATCCCC | 1941 | GATCCCC | 2878 |
| ebv-miR-BART6-5p | UAAGGUUGGUCCAAUCCAUAGG | 68 | ACCAACCTT | 1005 | CCAACCTT | 1942 | CAACCTT | 2879 |
| ebv-miR-BART7 | CAUCAUAGUCCAGUGUCCAGGG | 69 | GACTATGAT | 1006 | ACTATGAT | 1943 | CTATGAT | 2880 |
| ebv-miR-BART7* | CCUGGACCUUGACUAUGAAACA | 70 | AAGGTCCAG | 1007 | AGGTCCAG | 1944 | GGTCCAG | 2881 |
| ebv-miR-BART8 | UACGGUUUCCUAGAUUGUACAG | 71 | GGAAACCGT | 1008 | GAAACCGT | 1945 | AAACCGT | 2882 |
| ebv-miR-BART8* | GUCACAAUCUAUGGGGUCGUAGA | 72 | AGATTGTGA | 1009 | GATTGTGA | 1946 | ATTGTGA | 2883 |
| ebv-miR-BART9 | UAACACUUCAUGGGUCCCGUAGU | 73 | TGAAGTGTT | 1010 | GAAGTGTT | 1947 | AAGTGTT | 2884 |
| ebv-miR-BART9* | UACUGGACCCUGAAUUGGAAAC | 74 | GGGTCCAGT | 1011 | GGTCCAGT | 1948 | GTCCAGT | 2885 |
| ebv-miR-BHRF1-1 | UAACCUGAUCAGCCCCGGAGUU | 75 | GATCAGGTT | 1012 | ATCAGGTT | 1949 | TCAGGTT | 2886 |
| ebv-miR-BHRF1-2 | UAUCUUUUGCGGCAGAAAUUGA | 76 | GCAAAAGAT | 1013 | CAAAAGAT | 1950 | AAAAGAT | 2887 |
| ebv-miR-BHRF1-2* | AAAUUCUGUUGCAGCAGAUAGC | 77 | AACAGAATT | 1014 | ACAGAATT | 1951 | CAGAATT | 2888 |
| ebv-miR-BHRF1-3 | UAACGGGAAGUGUGUAAGCACA | 78 | CTTCCCGTT | 1015 | TTCCCGTT | 1952 | TCCCGTT | 2889 |
| hcmv-miR-UL112 | AAGUGACGGUGAGAUCCAGGCU | 79 | ACCGTCACT | 1016 | CCGTCACT | 1953 | CGTCACT | 2890 |
| hcmv-miR-UL148D | UCGUCCUCCCCUUCUUCACCG | 80 | GGGAGGACG | 1017 | GGAGGACG | 1954 | GAGGACG | 2891 |
| hcmv-miR-UL22A | UAACUAGCCUUCCCGUGAGA | 81 | AGGCTAGTT | 1018 | GGCTAGTT | 1955 | GCTAGTT | 2892 |
| hcmv-miR-UL22A* | UCACCAGAAUGCUAGUUUGUAG | 82 | ATTCTGGTG | 1019 | TTCTGGTG | 1956 | TCTGGTG | 2893 |
| hcmv-miR-UL36 | UCGUUGAAGACACCUGGAAAGA | 83 | TCTTCAACG | 1020 | CTTCAACG | 1957 | TTCAACG | 2894 |
| hcmv-miR-UL36* | UUUCCAGGUGUUUUCAACGUGC | 84 | CACCTGGAA | 1021 | ACCTGGAA | 1958 | CCTGGAA | 2895 |
| hcmv-miR-UL70-3p | GGGGAUGGGCUGGCGCGCGG | 85 | GCCCATCCC | 1022 | CCCATCCC | 1959 | CCATCCC | 2896 |
| hcmv-miR-UL70-5p | UGCGUCUCGGCCUCGUCCAGA | 86 | CCGAGACGC | 1023 | CGAGACGC | 1960 | GAGACGC | 2897 |
| hcmv-miR-US25-1 | AACCGCUCAGUGGCUCGGACC | 87 | CTGAGCGGT | 1024 | TGAGCGGT | 1961 | GAGCGGT | 2898 |
| hcmv-miR-US25-1* | UCCGAACGCUAGGUCGGUUCUC | 88 | AGCGTTCGG | 1025 | GCGTTCGG | 1962 | CGTTCGG | 2899 |
| hcmv-miR-US25-2- | AUCCACUUGGAGAGCUCCCGCGG | 89 | CCAAGTGGA | 1026 | CAAGTGGA | 1963 | AAGTGGA | 2900 |
| 3p | | | | | | | | |
| hcmv-miR-US25-2- | AGCGGUCUGUUCAGGUGGAUGA | 90 | ACAGACCGC | 1027 | CAGACCGC | 1964 | AGACCGC | 2901 |
| 5p | | | | | | | | |
| hcmv-miR-US33-3p | UCACGGUCCGAGCACAUCCA | 91 | CGGACCGTG | 1028 | GGACCGTG | 1965 | GACCGTG | 2902 |
| hcmv-miR-US33-5p | GAUUGUGCCCGGACCGUGGGCG | 92 | GGGCACAAT | 1029 | GGCACAAT | 1966 | GCACAAT | 2903 |
| hcmv-miR-US4 | CGACAUGGACGUGCAGGGGGAU | 93 | GTCCATGTC | 1030 | TCCATGTC | 1967 | CCATGTC | 2904 |
| hcmv-miR-US5-1 | UGACAAGCCUGACGAGAGCGU | 94 | AGGCTTGTC | 1031 | GGCTTGTC | 1968 | GCTTGTC | 2905 |
| hcmv-miR-US5-2 | UUAUGAUAGGUGUGACGAUGUC | 95 | CCTATCATA | 1032 | CTATCATA | 1969 | TATCATA | 2906 |
| hsa-let-7a | UGAGGUAGUAGGUUGUAUAGUU | 96 | TACTACCTC | 1033 | ACTACCTC | 1970 | CTACCTC | 2907 |
| hsa-let-7a* | CUAUACAAUCUACUGUCUUUC | 97 | GATTGTATA | 1034 | ATTGTATA | 1971 | TTGTATA | 2908 |
| hsa-let-7b | UGAGGUAGUAGGUUGUGUGGUU | 98 | TACTACCTC | 1035 | ACTACCTC | 1972 | CTACCTC | 2909 |
| hsa-let-7b* | CUAUACAACCUACUGCCUUCCC | 99 | GGTTGTATA | 1036 | GTTGTATA | 1973 | TTGTATA | 2910 |
| hsa-let-7c | UGAGGUAGUAGGUUGUAUGGUU | 100 | TACTACCTC | 1037 | ACTACCTC | 1974 | CTACCTC | 2911 |
| hsa-let-7c* | UAGAGUUACACCCUGGGAGUUA | 101 | TGTAACTCT | 1038 | GTAACTCT | 1975 | TAACTCT | 2912 |
| hsa-let-7d | AGAGGUAGUAGGUUGCAUAGUU | 102 | TACTACCTC | 1039 | ACTACCTC | 1976 | CTACCTC | 2913 |
| hsa-let-7d* | CUAUACGACCUGCUGCCUUUCU | 103 | GGTCGTATA | 1040 | GTCGTATA | 1977 | TCGTATA | 2914 |
| hsa-let-7e | UGAGGUAGGAGGUUGUAUAGUU | 104 | TCCTACCTC | 1041 | CCTACCTC | 1978 | CTACCTC | 2915 |
| hsa-let-7e* | CUAUACGGCCUCCUAGCUUUCC | 105 | GGCCGTATA | 1042 | GCCGTATA | 1979 | CCGTATA | 2916 |
| hsa-let-7f | UGAGGUAGUAGAUUGUAUAGUU | 106 | TACTACCTC | 1043 | ACTACCTC | 1980 | CTACCTC | 2917 |
| hsa-let-7f-1* | CUAUACAAUCUAUUGCCUUCCC | 107 | GATTGTATA | 1044 | ATTGTATA | 1981 | TTGTATA | 2918 |
| hsa-let-7f-2* | CUAUACAGUCUACUGUCUUUCC | 108 | GACTGTATA | 1045 | ACTGTATA | 1982 | CTGTATA | 2919 |
| hsa-let-7g | UGAGGUAGUAGUUUGUACAGUU | 109 | TACTACCTC | 1046 | ACTACCTC | 1983 | CTACCTC | 2920 |
| hsa-let-7g* | CUGUACAGGCCACUGCCUUGC | 110 | GCCTGTACA | 1047 | CCTGTACA | 1984 | CTGTACA | 2921 |
| hsa-let-7i | UGAGGUAGUAGUUUGUGCUGUU | 111 | TACTACCTC | 1048 | ACTACCTC | 1985 | CTACCTC | 2922 |
| hsa-let-7i* | CUGCGCAAGCUACUGCCUUGCU | 112 | GCTTGCGCA | 1049 | CTTGCGCA | 1986 | TTGCGCA | 2923 |
| hsa-miR-1 | UGGAAUGUAAAGAAGUAUGUAU | 113 | TTACATTCC | 1050 | TACATTCC | 1987 | ACATTCC | 2924 |
| hsa-miR-100 | AACCCGUAGAUCCGAACUUGUG | 114 | TCTACGGGT | 1051 | CTACGGGT | 1988 | TACGGGT | 2925 |
| hsa-miR-100* | CAAGCUUGUAUCUAUAGGUAUG | 115 | TACAAGCTT | 1052 | ACAAGCTT | 1989 | CAAGCTT | 2926 |
| hsa-miR-101 | UACAGUACUGUGAUAACUGAA | 116 | CAGTACTGT | 1053 | AGTACTGT | 1990 | GTACTGT | 2927 |
| hsa-miR-101* | CAGUUAUCACAGUGCUGAUGCU | 117 | GTGATAACT | 1054 | TGATAACT | 1991 | GATAACT | 2928 |
| hsa-miR-103 | AGCAGCAUUGUACAGGGCUAUGA | 118 | CAATGCTGC | 1055 | AATGCTGC | 1992 | ATGCTGC | 2929 |
| hsa-miR-103-as | UCAUAGCCCUGUACAAUGCUGCU | 119 | AGGGCTATG | 1056 | GGGCTATG | 1993 | GGCTATG | 2930 |
| hsa-miR-105 | UCAAAUGCUCAGACUCCUGUGGU | 120 | GAGCATTTG | 1057 | AGCATTTG | 1994 | GCATTTG | 2931 |
| hsa-miR-105* | ACGGAUGUUUGAGCAUGUGCUA | 121 | AAACATCCG | 1058 | AACATCCG | 1995 | ACATCCG | 2932 |
| hsa-miR-106a | AAAAGUGCUUACAGUGCAGGUAG | 122 | AAGCACTTT | 1059 | AGCACTTT | 1996 | GCACTTT | 2933 |
| hsa-miR-106a* | CUGCAAUGUAAGCACUUCUUAC | 123 | TACATTGCA | 1060 | ACATTGCA | 1997 | CATTGCA | 2934 |
| hsa-miR-106b | UAAAGUGCUGACAGUGCAGAU | 124 | CAGCACTTT | 1061 | AGCACTTT | 1998 | GCACTTT | 2935 |
| hsa-miR-106b* | CCGCACUGUGGGUACUUGCUGC | 125 | CACAGTGCG | 1062 | ACAGTGCG | 1999 | CAGTGCG | 2936 |
| hsa-miR-107 | AGCAGCAUUGUACAGGGCUAUCA | 126 | CAATGCTGC | 1063 | AATGCTGC | 2000 | ATGCTGC | 2937 |
| hsa-miR-10a | UACCCUGUAGAUCCGAAUUUGUG | 127 | CTACAGGGT | 1064 | TACAGGGT | 2001 | ACAGGGT | 2938 |
| hsa-miR-10a* | CAAAUUCGUAUCUAGGGGAAUA | 128 | TACGAATTT | 1065 | ACGAATTT | 2002 | CGAATTT | 2939 |
| hsa-miR-10b | UACCCUGUAGAACCGAAUUUGUG | 129 | CTACAGGGT | 1066 | TACAGGGT | 2003 | ACAGGGT | 2940 |
| hsa-miR-10b* | ACAGAUUCGAUUCUAGGGGAAU | 130 | TCGAATCTG | 1067 | CGAATCTG | 2004 | GAATCTG | 2941 |
| hsa-miR-1178 | UUGCUCACUGUUCUUCCCUAG | 131 | CAGTGAGCA | 1068 | AGTGAGCA | 2005 | GTGAGCA | 2942 |
| hsa-miR-1179 | AAGCAUUCUUUCAUUGGUUGG | 132 | AAGAATGCT | 1069 | AGAATGCT | 2006 | GAATGCT | 2943 |
| hsa-miR-1180 | UUUCCGGCUCGCGUGGGUGUGU | 133 | GAGCCGGAA | 1070 | AGCCGGAA | 2007 | GCCGGAA | 2944 |
| hsa-miR-1181 | CCGUCGCCGCCACCCGAGCCG | 134 | GCGGCGACG | 1071 | CGGCGACG | 2008 | GGCGACG | 2945 |
| hsa-miR-1182 | GAGGGUCUUGGGAGGGAUGUGAC | 135 | CAAGACCCT | 1072 | AAGACCCT | 2009 | AGACCCT | 2946 |
| hsa-miR-1183 | CACUGUAGGUGAUGGUGAGAGUGGGCA | 136 | ACCTACAGT | 1073 | CCTACAGT | 2010 | CTACAGT | 2947 |
| hsa-miR-1184 | CCUGCAGCGACUUGAUGGCUUCC | 137 | TCGCTGCAG | 1074 | CGCTGCAG | 2011 | GCTGCAG | 2948 |
| hsa-miR-1185 | AGAGGAUACCCUUUGUAUGUU | 138 | GGTATCCTC | 1075 | GTATCCTC | 2012 | TATCCTC | 2949 |
| hsa-miR-1197 | UAGGACACAUGGUCUACUUCU | 139 | ATGTGTCCT | 1076 | TGTGTCCT | 2013 | GTGTCCT | 2950 |
| hsa-miR-1200 | CUCCUGAGCCAUUCUGAGCCUC | 140 | GGCTCAGGA | 1077 | GCTCAGGA | 2014 | CTCAGGA | 2951 |
| hsa-miR-1201 | AGCCUGAUUAAACACAUGCUCUGA | 141 | TAATCAGGC | 1078 | AATCAGGC | 2015 | ATCAGGC | 2952 |
| hsa-miR-1202 | GUGCCAGCUGCAGUGGGGGAG | 142 | CAGCTGGCA | 1079 | AGCTGGCA | 2016 | GCTGGCA | 2953 |
| hsa-miR-1203 | CCCGGAGCCAGGAUGCAGCUC | 143 | TGGCTCCGG | 1080 | GGCTCCGG | 2017 | GCTCCGG | 2954 |
| hsa-miR-1204 | UCGUGGCCUGGUCUCCAUUAU | 144 | CAGGCCACG | 1081 | AGGCCACG | 2018 | GGCCACG | 2955 |
| hsa-miR-1205 | UCUGCAGGGUUUGCUUUGAG | 145 | ACCCTGCAG | 1082 | CCCTGCAG | 2019 | CCTGCAG | 2956 |
| hsa-miR-1206 | UGUUCAUGUAGAUGUUUAAGC | 146 | TACATGAAC | 1083 | ACATGAAC | 2020 | CATGAAC | 2957 |
| hsa-miR-1207-3p | UCAGCUGGCCCUCAUUUC | 147 | GGCCAGCTG | 1084 | GCCAGCTG | 2021 | CCAGCTG | 2958 |
| hsa-miR-1207-5p | UGGCAGGGAGGCUGGGAGGGG | 148 | CTCCCTGCC | 1085 | TCCCTGCC | 2022 | CCCTGCC | 2959 |
| hsa-miR-1208 | UCACUGUUCAGACAGGCGGA | 149 | TGAACAGTG | 1086 | GAACAGTG | 2023 | AACAGTG | 2960 |
| hsa-miR-122 | UGGAGUGUGACAAUGGUGUUUG | 150 | TCACACTCC | 1087 | CACACTCC | 2024 | ACACTCC | 2961 |
| hsa-miR-122* | AACGCCAUUAUCACACUAAAUA | 151 | TAATGGCGT | 1088 | AATGGCGT | 2025 | ATGGCGT | 2962 |
| hsa-miR-1224-3p | CCCCACCUCCUCUCUCCUCAG | 152 | GGAGGTGGG | 1089 | GAGGTGGG | 2026 | AGGTGGG | 2963 |
| hsa-miR-1224-5p | GUGAGGACUCGGGAGGUGG | 153 | GAGTCCTCA | 1090 | AGTCCTCA | 2027 | GTCCTCA | 2964 |
| hsa-miR-1225-3p | UGAGCCCCUGUGCCGCCCCCAG | 154 | CAGGGGCTC | 1091 | AGGGGCTC | 2028 | GGGGCTC | 2965 |
| hsa-miR-1225-5p | GUGGGUACGGCCCAGUGGGGGG | 155 | CCGTACCCA | 1092 | CGTACCCA | 2029 | GTACCCA | 2966 |
| hsa-miR-1226 | UCACCAGCCCUGUGUUCCCUAG | 156 | GGGCTGGTG | 1093 | GGCTGGTG | 2030 | GCTGGTG | 2967 |
| hsa-miR-1226* | GUGAGGGCAUGCAGGCCUGGAUGGGG | 157 | ATGCCCTCA | 1094 | TGCCCTCA | 2031 | GCCCTCA | 2968 |
| hsa-miR-1227 | CGUGCCACCCUUUUCCCCAG | 158 | GGGTGGCAC | 1095 | GGTGGCAC | 2032 | GTGGCAC | 2969 |
| hsa-miR-1228 | UCACACCUGCCUCGCCCCCC | 159 | GCAGGTGTG | 1096 | CAGGTGTG | 2033 | AGGTGTG | 2970 |
| hsa-miR-1228* | GUGGGCGGGGGCAGGUGUGUG | 160 | CCCCGCCCA | 1097 | CCCGCCCA | 2034 | CCGCCCA | 2971 |
| hsa-miR-1229 | CUCUCACCACUGCCCUCCCACAG | 161 | GTGGTGAGA | 1098 | TGGTGAGA | 2035 | GGTGAGA | 2972 |
| hsa-miR-1231 | GUGUCUGGGCGGACAGCUGC | 162 | GCCCAGACA | 1099 | CCCAGACA | 2036 | CCAGACA | 2973 |
| hsa-miR-1233 | UGAGCCCUGUCCUCCCGCAG | 163 | ACAGGGCTC | 1100 | CAGGGCTC | 2037 | AGGGCTC | 2974 |
| hsa-miR-1234 | UCGGCCUGACCACCCACCCCAC | 164 | GTCAGGCCG | 1101 | TCAGGCCG | 2038 | CAGGCCG | 2975 |
| hsa-miR-1236 | CCUCUUCCCCUUGUCUCUCCAG | 165 | GGGGAAGAG | 1102 | GGGAAGAG | 2039 | GGAAGAG | 2976 |
| hsa-miR-1237 | UCCUUCUGCUCCGUCCCCCAG | 166 | AGCAGAAGG | 1103 | GCAGAAGG | 2040 | CAGAAGG | 2977 |
| hsa-miR-1238 | CUUCCUCGUCUGUCUGCCCC | 167 | GACGAGGAA | 1104 | ACGAGGAA | 2041 | CGAGGAA | 2978 |
| hsa-miR-124 | UAAGGCACGCGGUGAAUGCC | 168 | GCGTGCCTT | 1105 | CGTGCCTT | 2042 | GTGCCTT | 2979 |
| hsa-miR-124* | CGUGUUCACAGCGGACCUUGAU | 169 | TGTGAACAC | 1106 | GTGAACAC | 2043 | TGAACAC | 2980 |
| hsa-miR-1243 | AACUGGAUCAAUUAUAGGAGUG | 170 | TGATCCAGT | 1107 | GATCCAGT | 2044 | ATCCAGT | 2981 |
| hsa-miR-1244 | AAGUAGUUGGUUUGUAUGAGAUGGUU | 171 | CCAACTACT | 1108 | CAACTACT | 2045 | AACTACT | 2982 |
| hsa-miR-1245 | AAGUGAUCUAAAGGCCUACAU | 172 | TAGATCACT | 1109 | AGATCACT | 2046 | GATCACT | 2983 |
| hsa-miR-1246 | AAUGGAUUUUUGGAGCAGG | 173 | AAAATCCAT | 1110 | AAATCCAT | 2047 | AATCCAT | 2984 |
| hsa-miR-1247 | ACCCGUCCCGUUCGUCCCCGGA | 174 | CGGGACGGG | 1111 | GGGACGGG | 2048 | GGACGGG | 2985 |
| hsa-miR-1248 | ACCUUCUUGUAUAAGCACUGUGCUAAA | 175 | ACAAGAAGG | 1112 | CAAGAAGG | 2049 | AAGAAGG | 2986 |
| hsa-miR-1249 | ACGCCCUUCCCCCCCUUCUUCA | 176 | GGAAGGGCG | 1113 | GAAGGGCG | 2050 | AAGGGCG | 2987 |
| hsa-miR-1250 | ACGGUGCUGGAUGUGGCCUUU | 177 | CCAGCACCG | 1114 | CAGCACCG | 2051 | AGCACCG | 2988 |
| hsa-miR-1251 | ACUCUAGCUGCCAAAGGCGCU | 178 | CAGCTAGAG | 1115 | AGCTAGAG | 2052 | GCTAGAG | 2989 |
| hsa-miR-1252 | AGAAGGAAAUUGAAUUCAUUUA | 179 | ATTTCCTTC | 1116 | TTTCCTTC | 2053 | TTCCTTC | 2990 |
| hsa-miR-1253 | AGAGAAGAAGAUCAGCCUGCA | 180 | CTTCTTCTC | 1117 | TTCTTCTC | 2054 | TCTTCTC | 2991 |
| hsa-miR-1254 | AGCCUGGAAGCUGGAGCCUGCAGU | 181 | CTTCCAGGC | 1118 | TTCCAGGC | 2055 | TCCAGGC | 2992 |
| hsa-miR-1255a | AGGAUGAGCAAAGAAAGUAGAUU | 182 | TGCTCATCC | 1119 | GCTCATCC | 2056 | CTCATCC | 2993 |
| hsa-miR-1255b | CGGAUGAGCAAAGAAAGUGGUU | 183 | TGCTCATCC | 1120 | GCTCATCC | 2057 | CTCATCC | 2994 |
| hsa-miR-1256 | AGGCAUUGACUUCUCACUAGCU | 184 | GTCAATGCC | 1121 | TCAATGCC | 2058 | CAATGCC | 2995 |
| hsa-miR-1257 | AGUGAAUGAUGGGUUCUGACC | 185 | ATCATTCAC | 1122 | TCATTCAC | 2059 | CATTCAC | 2996 |
| hsa-miR-1258 | AGUUAGGAUUAGGUCGUGGAA | 186 | AATCCTAAC | 1123 | ATCCTAAC | 2060 | TCCTAAC | 2997 |
| hsa-miR-1259 | AUAUAUGAUGACUUAGCUUUU | 187 | CATCATATA | 1124 | ATCATATA | 2061 | TCATATA | 2998 |
| hsa-miR-125a-3p | ACAGGUGAGGUUCUUGGGAGCC | 188 | CCTCACCTG | 1125 | CTCACCTG | 2062 | TCACCTG | 2999 |
| hsa-miR-125a-5p | UCCCUGAGACCCUUUAACCUGUGA | 189 | GTCTCAGGG | 1126 | TCTCAGGG | 2063 | CTCAGGG | 3000 |
| hsa-miR-125b | UCCCUGAGACCCUAACUUGUGA | 190 | GTCTCAGGG | 1127 | TCTCAGGG | 2064 | CTCAGGG | 3001 |
| hsa-miR-125b-1* | ACGGGUUAGGCUCUUGGGAGCU | 191 | CCTAACCCG | 1128 | CTAACCCG | 2065 | TAACCCG | 3002 |
| hsa-miR-125b-2* | UCACAAGUCAGGCUCUUGGGAC | 192 | TGACTTGTG | 1129 | GACTTGTG | 2066 | ACTTGTG | 3003 |
| hsa-miR-126 | UCGUACCGUGAGUAAUAAUGCG | 193 | CACGGTACG | 1130 | ACGGTACG | 2067 | CGGTACG | 3004 |
| hsa-miR-126* | CAUUAUUACUUUUGGUACGCG | 194 | AGTAATAAT | 1131 | GTAATAAT | 2068 | TAATAAT | 3005 |
| hsa-miR-1260 | AUCCCACCUCUGCCACCA | 195 | GAGGTGGGA | 1132 | AGGTGGGA | 2069 | GGTGGGA | 3006 |
| hsa-miR-1261 | AUGGAUAAGGCUUUGGCUU | 196 | CCTTATCCA | 1133 | CTTATCCA | 2070 | TTATCCA | 3007 |
| hsa-miR-1262 | AUGGGUGAAUUUGUAGAAGGAU | 197 | ATTCACCCA | 1134 | TTCACCCA | 2071 | TCACCCA | 3008 |
| hsa-miR-1263 | AUGGUACCCUGGCAUACUGAGU | 198 | AGGGTACCA | 1135 | GGGTACCA | 2072 | GGTACCA | 3009 |
| hsa-miR-1264 | CAAGUCUUAUUUGAGCACCUGUU | 199 | ATAAGACTT | 1136 | TAAGACTT | 2073 | AAGACTT | 3010 |
| hsa-miR-1265 | CAGGAUGUGGUCAAGUGUUGUU | 200 | CCACATCCT | 1137 | CACATCCT | 2074 | ACATCCT | 3011 |
| hsa-miR-1266 | CCUCAGGGCUGUAGAACAGGGCU | 201 | AGCCCTGAG | 1138 | GCCCTGAG | 2075 | CCCTGAG | 3012 |
| hsa-miR-1267 | CCUGUUGAAGUGUAAUCCCCA | 202 | CTTCAACAG | 1139 | TTCAACAG | 2076 | TCAACAG | 3013 |
| hsa-miR-1268 | CGGGCGUGGUGGUGGGGG | 203 | ACCACGCCC | 1140 | CCACGCCC | 2077 | CACGCCC | 3014 |
| hsa-miR-1269 | CUGGACUGAGCCGUGCUACUGG | 204 | CTCAGTCCA | 1141 | TCAGTCCA | 2078 | CAGTCCA | 3015 |
| hsa-miR-127-3p | UCGGAUCCGUCUGAGCUUGGCU | 205 | ACGGATCCG | 1142 | CGGATCCG | 2079 | GGATCCG | 3016 |
| hsa-miR-127-5p | CUGAAGCUCAGAGGGCUCUGAU | 206 | TGAGCTTCA | 1143 | GAGCTTCA | 2080 | AGCTTCA | 3017 |
| hsa-miR-1270 | CUGGAGAUAUGGAAGAGCUGUGU | 207 | ATATCTCCA | 1144 | TATCTCCA | 2081 | ATCTCCA | 3018 |
| hsa-miR-1271 | CUUGGCACCUAGCAAGCACUCA | 208 | AGGTGCCAA | 1145 | GGTGCCAA | 2082 | GTGCCAA | 3019 |
| hsa-miR-1272 | GAUGAUGAUGGCAGCAAAUUCUGAAA | 209 | CATCATCAT | 1146 | ATCATCAT | 2083 | TCATCAT | 3020 |
| hsa-miR-1273 | GGGCGACAAAGCAAGACUCUUUCUU | 210 | TTTGTCGCC | 1147 | TTGTCGCC | 2084 | TGTCGCC | 3021 |
| hsa-miR-1274a | GUCCCUGUUCAGGCGCCA | 211 | GAACAGGGA | 1148 | AACAGGGA | 2085 | ACAGGGA | 3022 |
| hsa-miR-1274b | UCCCUGUUCGGGCGCCA | 212 | CGAACAGGG | 1149 | GAACAGGG | 2086 | AACAGGG | 3023 |
| hsa-miR-1275 | GUGGGGGAGAGGCUGUC | 213 | TCTCCCCCA | 1150 | CTCCCCCA | 2087 | TCCCCCA | 3024 |
| hsa-miR-1276 | UAAAGAGCCCUGUGGAGACA | 214 | GGGCTCTTT | 1151 | GGCTCTTT | 2088 | GCTCTTT | 3025 |
| hsa-miR-1277 | UACGUAGAUAUAUAUGUAUUUU | 215 | TATCTACGT | 1152 | ATCTACGT | 2089 | TCTACGT | 3026 |
| hsa-miR-1278 | UAGUACUGUGCAUAUCAUCUAU | 216 | CACAGTACT | 1153 | ACAGTACT | 2090 | CAGTACT | 3027 |
| hsa-miR-1279 | UCAUAUUGCUUCUUUCU | 217 | AGCAATATG | 1154 | GCAATATG | 2091 | CAATATG | 3028 |
| hsa-miR-128 | UCACAGUGAACCGGUCUCUUU | 218 | TTCACTGTG | 1155 | TCACTGTG | 2092 | CACTGTG | 3029 |
| hsa-miR-1280 | UCCCACCGCUGCCACCC | 219 | AGCGGTGGG | 1156 | GCGGTGGG | 2093 | CGGTGGG | 3030 |
| hsa-miR-1281 | UCGCCUCCUCCUCUCCC | 220 | GAGGAGGCG | 1157 | AGGAGGCG | 2094 | GGAGGCG | 3031 |
| hsa-miR-1282 | UCGUUUGCCUUUUUCUGCUU | 221 | AGGCAAACG | 1158 | GGCAAACG | 2095 | GCAAACG | 3032 |
| hsa-miR-1283 | UCUACAAAGGAAAGCGCUUUCU | 222 | CCTTTGTAG | 1159 | CTTTGTAG | 2096 | TTTGTAG | 3033 |
| hsa-miR-1284 | UCUAUACAGACCCUGGCUUUUC | 223 | TCTGTATAG | 1160 | CTGTATAG | 2097 | TGTATAG | 3034 |
| hsa-miR-1285 | UCUGGGCAACAAAGUGAGACCU | 224 | GTTGCCCAG | 1161 | TTGCCCAG | 2098 | TGCCCAG | 3035 |
| hsa-miR-1286 | UGCAGGACCAAGAUGAGCCCU | 225 | TGGTCCTGC | 1162 | GGTCCTGC | 2099 | GTCCTGC | 3036 |
| hsa-miR-1287 | UGCUGGAUCAGUGGUUCGAGUC | 226 | TGATCCAGC | 1163 | GATCCAGC | 2100 | ATCCAGC | 3037 |
| hsa-miR-1288 | UGGACUGCCCUGAUCUGGAGA | 227 | GGGCAGTCC | 1164 | GGCAGTCC | 2101 | GCAGTCC | 3038 |
| hsa-miR-1289 | UGGAGUCCAGGAAUCUGCAUUUU | 228 | CTGGACTCC | 1165 | TGGACTCC | 2102 | GGACTCC | 3039 |
| hsa-miR-129* | AAGCCCUUACCCCAAAAAGUAU | 229 | GTAAGGGCT | 1166 | TAAGGGCT | 2103 | AAGGGCT | 3040 |
| hsa-miR-129-3p | AAGCCCUUACCCCAAAAAGCAU | 230 | GTAAGGGCT | 1167 | TAAGGGCT | 2104 | AAGGGCT | 3041 |
| hsa-miR-129-5p | CUUUUUGCGGUCUGGGCUUGC | 231 | CCGCAAAAA | 1168 | CGCAAAAA | 2105 | GCAAAAA | 3042 |
| hsa-miR-1290 | UGGAUUUUUGGAUCAGGGA | 232 | CAAAAATCC | 1169 | AAAAATCC | 2106 | AAAATCC | 3043 |
| hsa-miR-1291 | UGGCCCUGACUGAAGACCAGCAGU | 233 | GTCAGGGCC | 1170 | TCAGGGCC | 2107 | CAGGGCC | 3044 |
| hsa-miR-1292 | UGGGAACGGGUUCCGGCAGACGCUG | 234 | CCCGTTCCC | 1171 | CCGTTCCC | 2108 | CGTTCCC | 3045 |
| hsa-miR-1293 | UGGGUGGUCUGGAGAUUUGUGC | 235 | AGACCACCC | 1172 | GACCACCC | 2109 | ACCACCC | 3046 |
| hsa-miR-1294 | UGUGAGGUUGGCAUUGUUGUCU | 236 | CAACCTCAC | 1173 | AACCTCAC | 2110 | ACCTCAC | 3047 |
| hsa-miR-1295 | UUAGGCCGCAGAUCUGGGUGA | 237 | TGCGGCCTA | 1174 | GCGGCCTA | 2111 | CGGCCTA | 3048 |
| hsa-miR-1296 | UUAGGGCCCUGGCUCCAUCUCC | 238 | AGGGCCCTA | 1175 | GGGCCCTA | 2112 | GGCCCTA | 3049 |
| hsa-miR-1297 | UUCAAGUAAUUCAGGUG | 239 | ATTACTTGA | 1176 | TTACTTGA | 2113 | TACTTGA | 3050 |
| hsa-miR-1298 | UUCAUUCGGCUGUCCAGAUGUA | 240 | GCCGAATGA | 1177 | CCGAATGA | 2114 | CGAATGA | 3051 |
| hsa-miR-1299 | UUCUGGAAUUCUGUGUGAGGGA | 241 | AATTCCAGA | 1178 | ATTCCAGA | 2115 | TTCCAGA | 3052 |
| hsa-miR-1300 | UUGAGAAGGAGGCUGCUG | 242 | TCCTTCTCA | 1179 | CCTTCTCA | 2116 | CTTCTCA | 3053 |
| hsa-miR-1301 | UUGCAGCUGCCUGGGAGUGACUUC | 243 | GCAGCTGCA | 1180 | CAGCTGCA | 2117 | AGCTGCA | 3054 |
| hsa-miR-1302 | UUGGGACAUACUUAUGCUAAA | 244 | TATGTCCCA | 1181 | ATGTCCCA | 2118 | TGTCCCA | 3055 |
| hsa-miR-1303 | UUUAGAGACGGGGUCUUGCUCU | 245 | CGTCTCTAA | 1182 | GTCTCTAA | 2119 | TCTCTAA | 3056 |
| hsa-miR-1304 | UUUGAGGCUACAGUGAGAUGUG | 246 | TAGCCTCAA | 1183 | AGCCTCAA | 2120 | GCCTCAA | 3057 |
| hsa-miR-1305 | UUUUCAACUCUAAUGGGAGAGA | 247 | GAGTTGAAA | 1184 | AGTTGAAA | 2121 | GTTGAAA | 3058 |
| hsa-miR-1306 | ACGUUGGCUCUGGUGGUG | 248 | GAGCCAACG | 1185 | AGCCAACG | 2122 | GCCAACG | 3059 |
| hsa-miR-1307 | ACUCGGCGUGGCGUCGGUCGUG | 249 | CACGCCGAG | 1186 | ACGCCGAG | 2123 | CGCCGAG | 3060 |
| hsa-miR-1308 | GCAUGGGUGGUUCAGUGG | 250 | CCACCCATG | 1187 | CACCCATG | 2124 | ACCCATG | 3061 |
| hsa-miR-130a | CAGUGCAAUGUUAAAAGGGCAU | 251 | CATTGCACT | 1188 | ATTGCACT | 2125 | TTGCACT | 3062 |
| hsa-miR-130a* | UUCACAUUGUGCUACUGUCUGC | 252 | ACAATGTGA | 1189 | CAATGTGA | 2126 | AATGTGA | 3063 |
| hsa-miR-130b | CAGUGCAAUGAUGAAAGGGCAU | 253 | CATTGCACT | 1190 | ATTGCACT | 2127 | TTGCACT | 3064 |
| hsa-miR-130b* | ACUCUUUCCCUGUUGCACUAC | 254 | GGGAAAGAG | 1191 | GGAAAGAG | 2128 | GAAATAG | 3065 |
| hsa-miR-132 | UAACAGUCUACAGCCAUGGUCG | 255 | TAGACTGTT | 1192 | AGACTGTT | 2129 | GACTGTT | 3066 |
| hsa-miR-132* | ACCGUGGCUUUCGAUUGUUACU | 256 | AAGCCACGG | 1193 | AGCCACGG | 2130 | GCCACGG | 3067 |
| hsa-miR-1321 | CAGGGAGGUGAAUGUGAU | 257 | CACCTCCCT | 1194 | ACCTCCCT | 2131 | CCTCCCT | 3068 |
| hsa-miR-1322 | GAUGAUGCUGCUGAUGCUG | 258 | CAGCATCAT | 1195 | AGCATCAT | 2132 | GCATCAT | 3069 |
| hsa-miR-1323 | UCAAAACUGAGGGGCAUUUUCU | 259 | TCAGTTTTG | 1196 | CAGTTTTG | 2133 | AGTTTTG | 3070 |
| hsa-miR-1324 | CCAGACAGAAUUCUAUGCACUUUC | 260 | TTCTGTCTG | 1197 | TCTGTCTG | 2134 | CTGTCTG | 3071 |
| hsa-miR-133a | UUUGGUCCCCUUCAACCAGCUG | 261 | GGGGACCAA | 1198 | GGGACCAA | 2135 | GGACCAA | 3072 |
| hsa-miR-133b | UUUGGUCCCCUUCAACCAGCUA | 262 | GGGGACCAA | 1199 | GGGACCAA | 2136 | GGACCAA | 3073 |
| hsa-miR-134 | UGUGACUGGUUGACCAGAGGGG | 263 | ACCAGTCAC | 1200 | CCAGTCAC | 2137 | CAGTCAC | 3074 |
| hsa-miR-135a | UAUGGCUUUUUAUUCCUAUGUGA | 264 | AAAAGCCAT | 1201 | AAAGCCAT | 2138 | AAGCCAT | 3075 |
| hsa-miR-135a* | UAUAGGGAUUGGAGCCGUGGCG | 265 | AATCCCTAT | 1202 | ATCCCTAT | 2139 | TCCCTAT | 3076 |
| hsa-miR-135b | UAUGGCUUUUCAUUCCUAUGUGA | 266 | AAAAGCCAT | 1203 | AAAGCCAT | 2140 | AAGCCAT | 3077 |
| hsa-miR-135b* | AUGUAGGGCUAAAAGCCAUGGG | 267 | AGCCCTACA | 1204 | GCCCTACA | 2141 | CCCTACA | 3078 |
| hsa-miR-136 | ACUCCAUUUGUUUUGAUGAUGGA | 268 | CAAATGGAG | 1205 | AAATGGAG | 2142 | AATGGAG | 3079 |
| hsa-miR-136* | CAUCAUCGUCUCAAAUGAGUCU | 269 | GACGATGAT | 1206 | ACGATGAT | 2143 | CGATGAT | 3080 |
| hsa-miR-137 | UUAUUGCUUAAGAAUACGCGUAG | 270 | TAAGCAATA | 1207 | AAGCAATA | 2144 | AGCAATA | 3081 |
| hsa-miR-138 | AGCUGGUGUUGUGAAUCAGGCCG | 271 | AACACCAGC | 1208 | ACACCAGC | 2145 | CACCAGC | 3082 |
| hsa-miR-138-1* | GCUACUUCACAACACCAGGGCC | 272 | GTGAAGTAG | 1209 | TGAAGTAG | 2146 | GAAGTAG | 3083 |
| hsa-miR-138-2* | GCUAUUUCACGACACCAGGGUU | 273 | GTGAAATAG | 1210 | TGAAATAG | 2147 | GAAATAG | 3084 |
| hsa-miR-139-3p | GGAGACGCGGCCCUGUUGGAGU | 274 | CCGCGTCTC | 1211 | CGCGTCTC | 2148 | GCGTCTC | 3085 |
| hsa-miR-139-5p | UCUACAGUGCACGUGUCUCCAG | 275 | GCACTGTAG | 1212 | CACTGTAG | 2149 | ACTGTAG | 3086 |
| hsa-miR-140-3p | UACCACAGGGUAGAACCACGG | 276 | CCCTGTGGT | 1213 | CCTGTGGT | 2150 | CTGTGGT | 3087 |
| hsa-miR-140-5p | CAGUGGUUUUACCCUAUGGUAG | 277 | AAAACCACT | 1214 | AAACCACT | 2151 | AACCACT | 3088 |
| hsa-miR-141 | UAACACUGUCUGGUAAAGAUGG | 278 | GACAGTGTT | 1215 | ACAGTGTT | 2152 | CAGTGTT | 3089 |
| hsa-miR-141* | CAUCUUCCAGUACAGUGUUGGA | 279 | CTGGAAGAT | 1216 | TGGAAGAT | 2153 | GGAAGAT | 3090 |
| hsa-miR-142-3p | UGUAGUGUUUCCUACUUUAUGGA | 280 | AAACACTAC | 1217 | AACACTAC | 2154 | ACACTAC | 3091 |
| hsa-miR-142-5p | CAUAAAGUAGAAAGCACUACU | 281 | CTACTTTAT | 1218 | TACTTTAT | 2155 | ACTTTAT | 3092 |
| hsa-miR-143 | UGAGAUGAAGCACUGUAGCUC | 282 | CTTCATCTC | 1219 | TTCATCTC | 2156 | TCATCTC | 3093 |
| hsa-miR-143* | GGUGCAGUGCUGCAUCUCUGGU | 283 | GCACTGCAC | 1220 | CACTGCAC | 2157 | ACTGCAC | 3094 |
| hsa-miR-144 | UACAGUAUAGAUGAUGUACU | 284 | CTATACTGT | 1221 | TATACTGT | 2158 | ATACTGT | 3095 |
| hsa-miR-144* | GGAUAUCAUCAUAUACUGUAAG | 285 | GATGATATC | 1222 | ATGATATC | 2159 | TGATATC | 3096 |
| hsa-miR-145 | GUCCAGUUUUCCCAGGAAUCCCU | 286 | AAAACTGGA | 1223 | AAACTGGA | 2160 | AACTGGA | 3097 |
| hsa-miR-145* | GGAUUCCUGGAAAUACUGUUCU | 287 | CCAGGAATC | 1224 | CAGGAATC | 2161 | AGGAATC | 3098 |
| hsa-miR-1468 | CUCCGUUUGCCUGUUUCGCUG | 288 | GCAAACGGA | 1225 | CAAACGGA | 2162 | AAACGGA | 3099 |
| hsa-miR-1469 | CUCGGCGCGGGGCGCGGGCUCC | 289 | CCGCGCCGA | 1226 | CGCGCCGA | 2163 | GCGCCGA | 3100 |
| hsa-miR-146a | UGAGAACUGAAUUCCAUGGGUU | 290 | TCAGTTCTC | 1227 | CAGTTCTC | 2164 | AGTTCTC | 3101 |
| hsa-miR-146a* | CCUCUGAAAUUCAGUUCUUCAG | 291 | ATTTCAGAG | 1228 | TTTCAGAG | 2165 | TTCAGAG | 3102 |
| hsa-miR-146b-3p | UGCCCUGUGGACUCAGUUCUGG | 292 | CCACAGGGC | 1229 | CACAGGGC | 2166 | ACAGGGC | 3103 |
| hsa-miR-146b-5p | UGAGAACUGAAUUCCAUAGGCU | 293 | TCAGTTCTC | 1230 | CAGTTCTC | 2167 | AGTTCTC | 3104 |
| hsa-miR-147 | GUGUGUGGAAAUGCUUCUGC | 294 | TTCCACACA | 1231 | TCCACACA | 2168 | CCACACA | 3105 |
| hsa-miR-1470 | GCCCUCCGCCCGUGCACCCCG | 295 | GGCGGAGGG | 1232 | GCGGAGGG | 2169 | CGGAGGG | 3106 |
| hsa-miR-1471 | GCCCGCGUGUGGAGCCAGGUGU | 296 | ACACGCGGG | 1233 | CACGCGGG | 2170 | ACGCGGG | 3107 |
| hsa-miR-147b | GUGUGCGGAAAUGCUUCUGCUA | 297 | TTCCGCACA | 1234 | TCCGCACA | 2171 | CCGCACA | 3108 |
| hsa-miR-148a | UCAGUGCACUACAGAACUUUGU | 298 | AGTGCACTG | 1235 | GTGCACTG | 2172 | TGCACTG | 3109 |
| hsa-miR-148a* | AAAGUUCUGAGACACUCCGACU | 299 | TCAGAACTT | 1236 | CAGAACTT | 2173 | AGAACTT | 3110 |
| hsa-miR-148b | UCAGUGCAUCACAGAACUUUGU | 300 | GATGCACTG | 1237 | ATGCACTG | 2174 | TGCACTG | 3111 |
| hsa-miR-148b* | AAGUUCUGUUAUACACUCAGGC | 301 | AACAGAACT | 1238 | ACAGAACT | 2175 | CAGAACT | 3112 |
| hsa-miR-149 | UCUGGCUCCGUGUCUUCACUCCC | 302 | CGGAGCCAG | 1239 | GGAGCCAG | 2176 | GAGCCAG | 3113 |
| hsa-miR-149* | AGGGAGGGACGGGGGCUGUGC | 303 | GTCCCTCCC | 1240 | TCCCTCCC | 2177 | CCCTCCC | 3114 |
| hsa-miR-150 | UCUCCCAACCCUUGUACCAGUG | 304 | GGTTGGGAG | 1241 | GTTGGGAG | 2178 | TTGGGAG | 3115 |
| hsa-miR-150* | CUGGUACAGGCCUGGGGGACAG | 305 | CCTGTACCA | 1242 | CTGTACCA | 2179 | TGTACCA | 3116 |
| hsa-miR-151-3p | CUAGACUGAAGCUCCUUGAGG | 306 | TTCAGTCTA | 1243 | TCAGTCTA | 2180 | CAGTCTA | 3117 |
| hsa-miR-151-5p | UCGAGGAGCUCACAGUCUAGU | 307 | AGCTCCTCG | 1244 | GCTCCTCG | 2181 | CTCCTCG | 3118 |
| hsa-miR-152 | UCAGUGCAUGACAGAACUUGG | 308 | CATGCACTG | 1245 | ATGCACTG | 2182 | TGCACTG | 3119 |
| hsa-miR-153 | UUGCAUAGUCACAAAAGUGAUC | 309 | GACTATGCA | 1246 | ACTATGCA | 2183 | CTATGCA | 3120 |
| hsa-miR-1537 | AAAACCGUCUAGUUACAGUUGU | 310 | AGACGGTTT | 1247 | GACGGTTT | 2184 | ACGGTTT | 3121 |
| hsa-miR-1538 | CGGCCCGGGCUGCUGCUGUUCCU | 311 | GCCCGGGCC | 1248 | CCCGGGCC | 2185 | CCGGGCC | 3122 |
| hsa-miR-1539 | UCCUGCGCGUCCCAGAUGCCC | 312 | ACGCGCAGG | 1249 | CGCGCAGG | 2186 | GCGCAGG | 3123 |
| hsa-miR-154 | UAGGUUAUCCGUGUUGCCUUCG | 313 | GGATAACCT | 1250 | GATAACCT | 2187 | ATAACCT | 3124 |
| hsa-miR-154* | AAUCAUACACGGUUGACCUAUU | 314 | GTGTATGAT | 1251 | TGTATGAT | 2188 | GTATGAT | 3125 |
| hsa-miR-155 | UUAAUGCUAAUCGUGAUAGGGGU | 315 | TTAGCATTA | 1252 | TAGCATTA | 2189 | AGCATTA | 3126 |
| hsa-miR-155* | CUCCUACAUAUUAGCAUUAACA | 316 | TATGTAGGA | 1253 | ATGTAGGA | 2190 | TGTAGGA | 3127 |
| hsa-miR-15a | UAGCAGCACAUAAUGGUUUGUG | 317 | TGTGCTGCT | 1254 | GTGCTGCT | 2191 | TGCTGCT | 3128 |
| hsa-miR-15a* | CAGGCCAUAUUGUGCUGCCUCA | 318 | ATATGGCCT | 1255 | TATGGCCT | 2192 | ATGGCCT | 3129 |
| hsa-miR-15b | UAGCAGCACAUCAUGGUUUACA | 319 | TGTGCTGCT | 1256 | GTGCTGCT | 2193 | TGCTGCT | 3130 |
| hsa-miR-15b* | CGAAUCAUUAUUUGCUGCUCUA | 320 | TAATGATTC | 1257 | AATGATTC | 2194 | ATGATTC | 3131 |
| hsa-miR-16 | UAGCAGCACGUAAAUAUUGGCG | 321 | CGTGCTGCT | 1258 | GTGCTGCT | 2195 | TGCTGCT | 3132 |
| hsa-miR-16-1* | CCAGUAUUAACUGUGCUGCUGA | 322 | TTAATACTG | 1259 | TAATACTG | 2196 | AATACTG | 3133 |
| hsa-miR-16-2* | CCAAUAUUACUGUGCUGCUUUA | 323 | GTAATATTG | 1260 | TAATATTG | 2197 | AATATTG | 3134 |
| hsa-miR-17 | CAAAGUGCUUACAGUGCAGGUAG | 324 | AAGCACTTT | 1261 | AGCACTTT | 2198 | GCACTTT | 3135 |
| hsa-miR-17* | ACUGCAGUGAAGGCACUUGUAG | 325 | TCACTGCAG | 1262 | CACTGCAG | 2199 | ACTGCAG | 3136 |
| hsa-miR-181a | AACAUUCAACGCUGUCGGUGAGU | 326 | GTTGAATGT | 1263 | TTGAATGT | 2200 | TGAATGT | 3137 |
| hsa-miR-181a* | ACCAUCGACCGUUGAUUGUACC | 327 | GGTCGATGG | 1264 | GTCGATGG | 2201 | TCGATGG | 3138 |
| hsa-miR-181a-2* | ACCACUGACCGUUGACUGUACC | 328 | GGTCAGTGG | 1265 | GTCAGTGG | 2202 | TCAGTGG | 3139 |
| hsa-miR-181b | AACAUUCAUUGCUGUCGGUGGGU | 329 | AATGAATGT | 1266 | ATGAATGT | 2203 | TGAATGT | 3140 |
| hsa-miR-181c | AACAUUCAACCUGUCGGUGAGU | 330 | GTTGAATGT | 1267 | TTGAATGT | 2204 | TGAATGT | 3141 |
| hsa-miR-181c* | AACCAUCGACCGUUGAGUGGAC | 331 | GTCGATGGT | 1268 | TCGATGGT | 2205 | CGATGGT | 3142 |
| hsa-miR-181d | AACAUUCAUUGUUGUCGGUGGGU | 332 | AATGAATGT | 1269 | ATGAATGT | 2206 | TGAATGT | 3143 |
| hsa-miR-182 | UUUGGCAAUGGUAGAACUCACACU | 333 | CATTGCCAA | 1270 | ATTGCCAA | 2207 | TTGCCAA | 3144 |
| hsa-miR-182* | UGGUUCUAGACUUGCCAACUA | 334 | TCTAGAACC | 1271 | CTAGAACC | 2208 | TAGAACC | 3145 |
| hsa-miR-1825 | UCCAGUGCCCUCCUCUCC | 335 | GGGCACTGG | 1272 | GGCACTGG | 2209 | GCACTGG | 3146 |
| hsa-miR-1826 | AUUGAUCAUCGACACUUCGAACGCAAU | 336 | GATGATCAA | 1273 | ATGATCAA | 2210 | TGATCAA | 3147 |
| hsa-miR-1827 | UGAGGCAGUAGAUUGAAU | 337 | TACTGCCTC | 1274 | ACTGCCTC | 2211 | CTGCCTC | 3148 |
| hsa-miR-183 | UAUGGCACUGGUAGAAUUCACU | 338 | CAGTGCCAT | 1275 | AGTGCCAT | 2212 | GTGCCAT | 3149 |
| hsa-miR-183* | GUGAAUUACCGAAGGGCCAUAA | 339 | GGTAATTCA | 1276 | GTAATTCA | 2213 | TAATTCA | 3150 |
| hsa-miR-184 | UGGACGGAGAACUGAUAAGGGU | 340 | TCTCCGTCC | 1277 | CTCCGTCC | 2214 | TCCGTCC | 3151 |
| hsa-miR-185 | UGGAGAGAAAGGCAGUUCCUGA | 341 | TTTCTCTCC | 1278 | TTCTCTCC | 2215 | TCTCTCC | 3152 |
| hsa-miR-185* | AGGGGCUGGCUUUCCUCUGGUC | 342 | GCCAGCCCC | 1279 | CCAGCCCC | 2216 | CAGCCCC | 3153 |
| hsa-miR-186 | CAAAGAAUUCUCCUUUUGGGCU | 343 | GAATTCTTT | 1280 | AATTCTTT | 2217 | ATTCTTT | 3154 |
| hsa-miR-186* | GCCCAAAGGUGAAUUUUUUGGG | 344 | ACCTTTGGG | 1281 | CCTTTGGG | 2218 | CTTTGGG | 3155 |
| hsa-miR-187 | UCGUGUCUUGUGUUGCAGCCGG | 345 | CAAGACACG | 1282 | AAGACACG | 2219 | AGACACG | 3156 |
| hsa-miR-187* | GGCUACAACACAGGACCCGGGC | 346 | TGTTGTAGC | 1283 | GTTGTAGC | 2220 | TTGTAGC | 3157 |
| hsa-miR-188-3p | CUCCCACAUGCAGGGUUUGCA | 347 | CATGTGGGA | 1284 | ATGTGGGA | 2221 | TGTGGGA | 3158 |
| hsa-miR-188-5p | CAUCCCUUGCAUGGUGGAGGG | 348 | GCAAGGGAT | 1285 | CAAGGGAT | 2222 | AAGGGAT | 3159 |
| hsa-miR-18a | UAAGGUGCAUCUAGUGCAGAUAG | 349 | ATGCACCTT | 1286 | TGCACCTT | 2223 | GCACCTT | 3160 |
| hsa-miR-18a* | ACUGCCCUAAGUGCUCCUUCUGG | 350 | TTAGGGCAG | 1287 | TAGGGCAG | 2224 | AGGGCAG | 3161 |
| hsa-miR-18b | UAAGGUGCAUCUAGUGCAGUUAG | 351 | ATGCACCTT | 1288 | TGCACCTT | 2225 | GCACCTT | 3162 |
| hsa-miR-18b* | UGCCCUAAAUGCCCCUUCUGGC | 352 | ATTTAGGGC | 1289 | TTTAGGGC | 2226 | TTAGGGC | 3163 |
| hsa-miR-190 | UGAUAUGUUUGAUAUAUUAGGU | 353 | AAACATATC | 1290 | AACATATC | 2227 | ACATATC | 3164 |
| hsa-miR-1908 | CGGCGGGGACGGCGAUUGGUC | 354 | GTCCCCGCC | 1291 | TCCCCGCC | 2228 | CCCCGCC | 3165 |
| hsa-miR-1909 | CGCAGGGGCCGGGUGCUCACCG | 355 | GGCCCCTGC | 1292 | GCCCCTGC | 2229 | CCCCTGC | 3166 |
| hsa-miR-1909* | UGAGUGCCGGUGCCUGCCCUG | 356 | CCGCCACTC | 1293 | CGGCACTC | 2230 | GGCACTC | 3167 |
| hsa-miR-190b | UGAUAUGUUUGAUAUUGGGUU | 357 | AAACATATC | 1294 | AACATATC | 2231 | ACATATC | 3168 |
| hsa-miR-191 | CAACGGAAUCCCAAAAGCAGCUG | 358 | GATTCCGTT | 1295 | ATTCCGTT | 2232 | TTCCGTT | 3169 |
| hsa-miR-191* | GCUGCGCUUGGAUUUCGUCCCC | 359 | CAAGCGCAG | 1296 | AAGCGCAG | 2233 | AGCGCAG | 3170 |
| hsa-miR-1910 | CCAGUCCUGUGCCUGCCGCCU | 360 | ACAGGACTG | 1297 | CAGGACTG | 2234 | AGGACTG | 3171 |
| hsa-miR-1911 | UGAGUACCGCCAUGUCUGUUGGG | 361 | GCGGTACTC | 1298 | CGGTACTC | 2235 | GGTACTC | 3172 |
| hsa-miR-1911* | CACCAGGCAUUGUGGUCUCC | 362 | ATGCCTGGT | 1299 | TGCCTGGT | 2236 | GCCTGGT | 3173 |
| hsa-miR-1912 | UACCCAGAGCAUGCAGUGUGAA | 363 | GCTCTGGGT | 1300 | CTCTGGGT | 2237 | TCTGGGT | 3174 |
| hsa-miR-1913 | UCUGCCCCCUCCGCUGCUGCCA | 364 | AGGGGGCAG | 1301 | GGGGGCAG | 2238 | GGGGCAG | 3175 |
| hsa-miR-1914 | CCCUGUGCCCGGCCCACUUCUG | 365 | GGGCACAGG | 1302 | GGCACAGG | 2239 | GCACAGG | 3176 |
| hsa-miR-1914* | GGAGGGGUCCCGCACUGGGAGG | 366 | GGACCCCTC | 1303 | GACCCCTC | 2240 | ACCCCTC | 3177 |
| hsa-miR-1915 | CCCCAGGGCGACGCGGCGGG | 367 | CGCCCTGGG | 1304 | GCCCTGGG | 2241 | CCCTGGG | 3178 |
| hsa-miR-1915* | ACCUUGCCUUGCUGCCCGGGCC | 368 | AAGGCAAGG | 1305 | AGGCAAGG | 2242 | GGCAAGG | 3179 |
| hsa-miR-192 | CUGACCUAUGAAUUGACAGCC | 369 | CATAGGTCA | 1306 | ATAGGTCA | 2243 | TAGGTCA | 3180 |
| hsa-miR-192* | CUGCCAAUUCCAUAGGUCACAG | 370 | GAATTGGCA | 1307 | AATTGGCA | 2244 | ATTGGCA | 3181 |
| hsa-miR-193a-3p | AACUGGCCUACAAAGUCCCAGU | 371 | TAGGCCAGT | 1308 | AGGCCAGT | 2245 | GGCCAGT | 3182 |
| hsa-miR-193a-5p | UGGGUCUUUGCGGGCGAGAUGA | 372 | CAAAGACCC | 1309 | AAAGACCC | 2246 | AAGACCC | 3183 |
| hsa-miR-193b | AACUGGCCCUCAAAGUCCCGCU | 373 | AGGGCCAGT | 1310 | GGGCCAGT | 2247 | GGCCAGT | 3184 |
| hsa-miR-193b* | CGGGGUUUUGAGGGCGAGAUGA | 374 | CAAAACCCC | 1311 | AAAACCCC | 2248 | AAACCCC | 3185 |
| hsa-miR-194 | UGUAACAGCAACUCCAUGUGGA | 375 | TGCTGTTAC | 1312 | GCTGTTAC | 2249 | CTGTTAC | 3186 |
| hsa-miR-194* | CCAGUGGGGCUGCUGUUAUCUG | 376 | GCCCCACTG | 1313 | CCCCACTG | 2250 | CCCACTG | 3187 |
| hsa-miR-195 | UAGCAGCACAGAAAUAUUGGC | 377 | TGTGCTGCT | 1314 | GTGCTGCT | 2251 | TGCTGCT | 3188 |
| hsa-miR-195* | CCAAUAUUGGCUGUGCUGCUCC | 378 | CCAATATTG | 1315 | CAATATTG | 2252 | AATATTG | 3189 |
| hsa-miR-196a | UAGGUAGUUUCAUGUUGUUGGG | 379 | AAACTACCT | 1316 | AACTACCT | 2253 | ACTACCT | 3190 |
| hsa-miR-196a* | CGGCAACAAGAAACUGCCUGAG | 380 | CTTGTTGCC | 1317 | TTGTTGCC | 2254 | TGTTGCC | 3191 |
| hsa-miR-196b | UAGGUAGUUUCCUGUUGUUGGG | 381 | AAACTACCT | 1318 | AACTACCT | 2255 | ACTACCT | 3192 |
| hsa-miR-197 | UUCACCACCUUCUCCACCCAGC | 382 | AGGTGGTGA | 1319 | GGTGGTGA | 2256 | GTGGTGA | 3193 |
| hsa-miR-198 | GGUCCAGAGGGGAGAUAGGUUC | 383 | CCTCTGGAC | 1320 | CTCTGGAC | 2257 | TCTGGAC | 3194 |
| hsa-miR-199a-5p | CCCAGUGUUCAGACUACCUGUUC | 384 | GAACACTGG | 1321 | AACACTGG | 2258 | ACACTGG | 3195 |
| hsa-miR-199b-3p | ACAGUAGUCUGCACAUUGGUUA | 385 | AGACTACTG | 1322 | GACTACTG | 2259 | ACTACTG | 3196 |
| hsa-miR-199b-5p | CCCAGUGUUUAGACUAUCUGUUC | 386 | AAACACTGG | 1323 | AACACTGG | 2260 | ACACTGG | 3197 |
| hsa-miR-19a | UGUGCAAAUCUAUGCAAAACUGA | 387 | GATTTGCAC | 1324 | ATTTGCAC | 2261 | TTTGCAC | 3198 |
| hsa-miR-19a* | AGUUUUGCAUAGUUGCACUACA | 388 | ATGCAAAAC | 1325 | TGCAAAAC | 2262 | GCAAAAC | 3199 |
| hsa-miR-19b | UGUGCAAAUCCAUGCAAAACUGA | 389 | GATTTGCAC | 1326 | ATTTGCAC | 2263 | TTTGCAC | 3200 |
| hsa-miR-19b-1* | AGUUUUGCAGGUUUGCAUCCAGC | 390 | CTGCAAAAC | 1327 | TGCAAAAC | 2264 | GCAAAAC | 3201 |
| hsa-miR-19b-2* | AGUUUUGCAGGUUUGCAUUUCA | 391 | CTGCAAAAC | 1328 | TGCAAAAC | 2265 | GCAAAAC | 3202 |
| hsa-miR-200a | UAACACUGUCUGGUAACGAUGU | 392 | GACAGTGTT | 1329 | ACAGTGTT | 2266 | CAGTGTT | 3203 |
| hsa-miR-200a* | CAUCUUACCGGACAGUGCUGGA | 393 | CGGTAAGAT | 1330 | GGTAAGAT | 2267 | GTAAGAT | 3204 |
| hsa-miR-200b | UAAUACUGCCUGGUAAUGAUGA | 394 | GGCAGTATT | 1331 | GCAGTATT | 2268 | CAGTATT | 3205 |
| hsa-miR-200b* | CAUCUUACUGGGCAGCAUUGGA | 395 | CAGTAAGAT | 1332 | AGTAAGAT | 2269 | GTAAGAT | 3206 |
| hsa-miR-200c | UAAUACUGCCGGGUAAUGAUGGA | 396 | GGCAGTATT | 1333 | GCAGTATT | 2270 | CAGTATT | 3207 |
| hsa-miR-200c* | CGUCUUACCCAGCAGUGUUUGG | 397 | GGGTAAGAC | 1334 | GGTAAGAC | 2271 | GTAAGAC | 3208 |
| hsa-miR-202 | AGAGGUAUAGGGCAUGGGAA | 398 | CTATACCTC | 1335 | TATACCTC | 2272 | ATACCTC | 3209 |
| hsa-miR-202* | UUCCUAUGCAUAUACUUCUUUG | 399 | TGCATAGGA | 1336 | GCATAGGA | 2273 | CATAGGA | 3210 |
| hsa-miR-203 | GUGAAAUGUUUAGGACCACUAG | 400 | AACATTTCA | 1337 | ACATTTCA | 2274 | CATTTCA | 3211 |
| hsa-miR-204 | UUCCCUUUGUCAUCCUAUGCCU | 401 | ACAAAGGGA | 1338 | CAAAGGGA | 2275 | AAAGGGA | 3212 |
| hsa-miR-205 | UCCUUCAUUCCACCGGAGUCUG | 402 | GAATGAAGG | 1339 | AATGAAGG | 2276 | ATGAAGG | 3213 |
| hsa-miR-206 | UGGAAUGUAAGGAAGUGUGUGG | 403 | TTACATTCC | 1340 | TACATTCC | 2277 | ACATTCC | 3214 |
| hsa-miR-208a | AUAAGACGAGCAAAAAGCUUGU | 404 | CTCGTCTTA | 1341 | TCGTCTTA | 2278 | CGTCTTA | 3215 |
| hsa-miR-208b | AUAAGACGAACAAAAGGUUUGU | 405 | TTCGTCTTA | 1342 | TCGTCTTA | 2279 | CGTCTTA | 3216 |
| hsa-miR-20a | UAAAGUGCUUAUAGUGCAGGUAG | 406 | AAGCACTTT | 1343 | AGCACTTT | 2280 | GCACTTT | 3217 |
| hsa-miR-20a* | ACUGCAUUAUGAGCACUUAAAG | 407 | ATAATGCAG | 1344 | TAATGCAG | 2281 | AATGCAG | 3218 |
| hsa-miR-20b | CAAAGUGCUCAUAGUGCAGGUAG | 408 | GAGCACTTT | 1345 | AGCACTTT | 2282 | GCACTTT | 3219 |
| hsa-miR-20b* | ACUGUAGUAUGGGCACUUCCAG | 409 | ATACTACAG | 1346 | TACTACAG | 2283 | ACTACAG | 3220 |
| hsa-miR-21 | UAGCUUAUCAGACUGAUGUUGA | 410 | TGATAAGCT | 1347 | GATAAGCT | 2284 | ATAAGCT | 3221 |
| hsa-miR-21* | CAACACCAGUCGAUGGGCUGU | 411 | ACTGGTGTT | 1348 | CTGGTGTT | 2285 | TGGTGTT | 3222 |
| hsa-miR-210 | CUGUGCGUGUGACAGCGGCUGA | 412 | ACACGCACA | 1349 | CACGCACA | 2286 | ACGCACA | 3223 |
| hsa-miR-211 | UUCCCUUUGUCAUCCUUCGCCU | 413 | ACAAAGGGA | 1350 | CAAAGGGA | 2287 | AAAGGGA | 3224 |
| hsa-miR-212 | UAACAGUCUCCAGUCACGGCC | 414 | GAGACTGTT | 1351 | AGACTGTT | 2288 | GACTGTT | 3225 |
| hsa-miR-214 | ACAGCAGGCACAGACAGGCAGU | 415 | TGCCTGCTG | 1352 | GCCTGCTG | 2289 | CCTGCTG | 3226 |
| hsa-miR-214* | UGCCUGUCUACACUUGCUGUGC | 416 | TAGACAGGC | 1353 | AGACAGGC | 2290 | GACAGGC | 3227 |
| hsa-miR-215 | AUGACCUAUGAAUUGACAGAC | 417 | CATAGGTCA | 1354 | ATAGGTCA | 2291 | TAGGTCA | 3228 |
| hsa-miR-216a | UAAUCUCAGCUGGCAACUGUGA | 418 | GCTGAGATT | 1355 | CTGAGATT | 2292 | TGAGATT | 3229 |
| hsa-miR-216b | AAAUCUCUGCAGGCAAAUGUGA | 419 | GCAGAGATT | 1356 | CAGAGATT | 2293 | AGAGATT | 3230 |
| hsa-miR-217 | UACUGCAUCAGGAACUGAUUGGA | 420 | TGATGCAGT | 1357 | GATGCAGT | 2294 | ATGCAGT | 3231 |
| hsa-miR-218 | UUGUGCUUGAUCUAACCAUGU | 421 | TCAAGCACA | 1358 | CAAGCACA | 229 | 5AAGCACA | 3232 |
| hsa-miR-218-1* | AUGGUUCCGUCAAGCACCAUGG | 422 | ACGGAACCA | 1359 | CGGAACCA | 2296 | GGAACCA | 3233 |
| hsa-miR-218-2* | CAUGGUUCUGUCAAGCACCGCG | 423 | CAGAACCAT | 1360 | AGAACCAT | 2297 | GAACCAT | 3234 |
| hsa-miR-219-1-3p | AGAGUUGAGUCUGGACGUCCCG | 424 | ACTCAACTC | 1361 | CTCAACTC | 2298 | TCAACTC | 3235 |
| hsa-miR-219-2-3p | AGAAUUGUGGCUGGACAUCUGU | 425 | CCACAATTC | 1362 | CACAATTC | 2299 | ACAATTC | 3236 |
| hsa-miR-219-5p | UGAUUGUCCAAACGCAAUUCU | 426 | TGGACAATC | 1363 | GGACAATC | 2300 | GACAATC | 3237 |
| hsa-miR-22 | AAGCUGCCAGUUGAAGAACUGU | 427 | CTGGCAGCT | 1364 | TGGCAGCT | 2301 | GGCAGCT | 3238 |
| hsa-miR-22* | AGUUCUUCAGUGGCAAGCUUUA | 428 | CTGAAGAAC | 1365 | TGAAGAAC | 2302 | GAAGAAC | 3239 |
| hsa-miR-220a | CCACACCGUAUCUGACACUUU | 429 | TACGGTGTG | 1366 | ACGGTGTG | 2303 | CGGTGTG | 3240 |
| hsa-miR-220b | CCACCACCGUGUCUGACACUU | 430 | ACGGTGGTG | 1367 | CGGTGGTG | 2304 | GGTGGTG | 3241 |
| hsa-miR-220c | ACACAGGGCUGUUGUGAAGACU | 431 | AGCCCTGTG | 1368 | GCCCTGTG | 2305 | CCCTGTG | 3242 |
| hsa-miR-221 | AGCUACAUUGUCUGCUGGGUUUC | 432 | CAATGTAGC | 1369 | AATGTAGC | 2306 | ATGTAGC | 3243 |
| hsa-miR-221* | ACCUGGCAUACAAUGUAGAUUU | 433 | TATGCCAGG | 1370 | ATGCCAGG | 2307 | TGCCAGG | 3244 |
| hsa-miR-222 | AGCUACAUCUGGCUACUGGGU | 434 | AGATGTAGC | 1371 | GATGTAGC | 2308 | ATGTAGC | 3245 |
| hsa-miR-222* | CUCAGUAGCCAGUGUAGAUCCU | 435 | GGCTACTGA | 1372 | GCTACTGA | 2309 | CTACTGA | 3246 |
| hsa-miR-223 | UGUCAGUUUGUCAAAUACCCCA | 436 | CAAACTGAC | 1373 | AAACTGAC | 2310 | AACTGAC | 3247 |
| hsa-miR-223* | CGUGUAUUUGACAAGCUGAGUU | 437 | CAAATACAC | 1374 | AAATACAC | 2311 | AATACAC | 3248 |
| hsa-miR-224 | CAAGUCACUAGUGGUUCCGUU | 438 | TAGTGACTT | 1375 | AGTGACTT | 2312 | GTGACTT | 3249 |
| hsa-miR-23a | AUCACAUUGCCAGGGAUUUCC | 439 | GCAATGTGA | 1376 | CAATGTGA | 2313 | AATGTGA | 3250 |
| hsa-miR-23a* | GGGGUUCCUGGGGAUGGGAUUU | 440 | CAGGAACCC | 1377 | AGGAACCC | 2314 | GGAACCC | 3251 |
| hsa-miR-23b | AUCACAUUGCCAGGGAUUACC | 441 | GCAATGTGA | 1378 | CAATGTGA | 2315 | AATGTGA | 3252 |
| hsa-miR-23b* | UGGGUUCCUGGCAUGCUGAUUU | 442 | CAGGAACCC | 1379 | AGGAACCC | 2316 | GGAACCC | 3253 |
| hsa-miR-24 | UGGCUCAGUUCAGCAGGAACAG | 443 | AACTGAGCC | 1380 | ACTGAGCC | 2317 | CTGAGCC | 3254 |
| hsa-miR-24-1* | UGCCUACUGAGCUGAUAUCAGU | 444 | TCAGTAGGC | 1381 | CAGTAGGC | 2318 | AGTAGGC | 3255 |
| hsa-miR-24-2* | UGCCUACUGAGCUGAAACACAG | 445 | TCAGTAGGC | 1382 | CAGTAGGC | 2319 | AGTAGGC | 3256 |
| hsa-miR-25 | CAUUGCACUUGUCUCGGUCUGA | 446 | AAGTGCAAT | 1383 | AGTGCAAT | 2320 | GTGCAAT | 3257 |
| hsa-miR-25* | AGGCGGAGACUUGGGCAAUUG | 447 | GTCTCCGCC | 1384 | TCTCCGCC | 2321 | CTCCGCC | 3258 |
| hsa-miR-26a | UUCAAGUAAUCCAGGAUAGGCU | 448 | ATTACTTGA | 1385 | TTACTTGA | 2322 | TACTTGA | 3259 |
| hsa-miR-26a-1* | CCUAUUCUUGGUUACUUGCACG | 449 | CAAGAATAG | 1386 | AAGAATAG | 2323 | AGAATAG | 3260 |
| hsa-miR-26a-2* | CCUAUUCUUGAUUACUUGUUUC | 450 | CAAGAATAG | 1387 | AAGAATAG | 2324 | AGAATAG | 3261 |
| hsa-miR-26b | UUCAAGUAAUUCAGGAUAGGU | 451 | ATTACTTGA | 1388 | TTACTTGA | 2325 | TACTTGA | 3262 |
| hsa-miR-26b* | CCUGUUCUCCAUUACUUGGCUC | 452 | GGAGAACAG | 1389 | GAGAACAG | 2326 | AGAACAG | 3263 |
| hsa-miR-27a | UUCACAGUGGCUAAGUUCCGC | 453 | CCACTGTGA | 1390 | CACTGTGA | 2327 | ACTGTGA | 3264 |
| hsa-miR-27a* | AGGGCUUAGCUGCUUGUGAGCA | 454 | GCTAAGCCC | 1391 | CTAAGCCC | 2328 | TAAGCCC | 3265 |
| hsa-miR-27b | UUCACAGUGGCUAAGUUCUGC | 455 | CCACTGTGA | 1392 | CACTGTGA | 2329 | ACTGTGA | 3266 |
| hsa-miR-27b* | AGAGCUUAGCUGAUUGGUGAAC | 456 | GCTAAGCTC | 1393 | CTAAGCTC | 2330 | TAAGCTC | 3267 |
| hsa-miR-28-3p | CACUAGAUUGUGAGCUCCUGGA | 457 | CAATCTAGT | 1394 | AATCTAGT | 2331 | ATCTAGT | 3268 |
| hsa-miR-28-5p | AAGGAGCUCACAGUCUAUUGAG | 458 | TGAGCTCCT | 1395 | GAGCTCCT | 2332 | AGCTCCT | 3269 |
| hsa-miR-296-3p | GAGGGUUGGGUGGAGGCUCUCC | 459 | CCCAACCCT | 1396 | CCAACCCT | 2333 | CAACCCT | 3270 |
| hsa-miR-296-5p | AGGGCCCCCCCUCAAUCCUGU | 460 | GGGGGGCCC | 1397 | GGGGGCCC | 2334 | GGGGCCC | 3271 |
| hsa-miR-297 | AUGUAUGUGUGCAUGUGCAUG | 461 | ACACATACA | 1398 | CACATACA | 2335 | ACATACA | 3272 |
| hsa-miR-298 | AGCAGAAGCAGGGAGGUUCUCCCA | 462 | TGCTTCTGC | 1399 | GCTTCTGC | 2336 | CTTCTGC | 3273 |
| hsa-miR-299-3p | UAUGUGGGAUGGUAAACCGCUU | 463 | ATCCCACAT | 1400 | TCCCACAT | 2337 | CCCACAT | 3274 |
| hsa-miR-299-5p | UGGUUUACCGUCCCACAUACAU | 464 | CGGTAAACC | 1401 | GGTAAACC | 2338 | GTAAACC | 3275 |
| hsa-miR-29a | UAGCACCAUCUGAAAUCGGUUA | 465 | GATGGTGCT | 1402 | ATGGTGCT | 2339 | TGGTGCT | 3276 |
| hsa-miR-29a* | ACUGAUUUCUUUUGGUGUUCAG | 466 | AGAAATCAG | 1403 | GAAATCAG | 2340 | AAATCAG | 3277 |
| hsa-miR-29b | UAGCACCAUUUGAAAUCAGUGUU | 467 | AATGGTGCT | 1404 | ATGGTGCT | 2341 | TGGTGCT | 3278 |
| hsa-miR-29b-1* | GCUGGUUUCAUAUGGUGGUUUAGA | 468 | TGAAACCAG | 1405 | GAAACCAG | 2342 | AAACCAG | 3279 |
| hsa-miR-29b-2* | CUGGUUUCACAUGGUGGCUUAG | 469 | GTGAAACCA | 1406 | TGAAACCA | 2343 | GAAACCA | 3280 |
| hsa-miR-29c | UAGCACCAUUUGAAAUCGGUUA | 470 | AATGGTGCT | 1407 | ATGGTGCT | 2344 | TGGTGCT | 3281 |
| hsa-miR-29c* | UGACCGAUUUCUCCUGGUGUUC | 471 | AAATCGGTC | 1408 | AATCGGTC | 2345 | ATCGGTC | 3282 |
| hsa-miR-300 | UAUACAAGGGCAGACUCUCUCU | 472 | CCCTTGTAT | 1409 | CCTTGTAT | 2346 | CTTGTAT | 3283 |
| hsa-miR-301a | CAGUGCAAUAGUAUUGUCAAAGC | 473 | TATTGCACT | 1410 | ATTGCACT | 2347 | TTGCACT | 3284 |
| hsa-miR-301b | CAGUGCAAUGAUAUUGUCAAAGC | 474 | CATTGCACT | 1411 | ATTGCACT | 2348 | TTGCACT | 3285 |
| hsa-miR-302a | UAAGUGCUUCCAUGUUUUGGUGA | 475 | GAAGCACTT | 1412 | AAGCACTT | 2349 | AGCACTT | 3286 |
| hsa-miR-302a* | ACUUAAACGUGGAUGUACUUGCU | 476 | ACGTTTAAG | 1413 | CGTTTAAG | 2350 | GTTTAAG | 3287 |
| hsa-miR-302b | UAAGUGCUUCCAUGUUUUAGUAG | 477 | GAAGCACTT | 1414 | AAGCACTT | 2351 | AGCACTT | 3288 |
| hsa-miR-302b* | ACUUUAACAUGGAAGUGCUUUC | 478 | ATGTTAAAG | 1415 | TGTTAAAG | 2352 | GTTAAAG | 3289 |
| hsa-miR-302c | UAAGUGCUUCCAUGUUUCAGUGG | 479 | GAAGCACTT | 1416 | AAGCACTT | 2353 | AGCACTT | 3290 |
| hsa-miR-302c* | UUUAACAUGGGGGUACCUGCUG | 480 | CCATGTTAA | 1417 | CATGTTAA | 2354 | ATGTTAA | 3291 |
| hsa-miR-302d | UAAGUGCUUCCAUGUUUGAGUGU | 481 | GAAGCACTT | 1418 | AAGCACTT | 2355 | AGCACTT | 3292 |
| hsa-miR-302d* | ACUUUAACAUGGAGGCACUUGC | 482 | ATGTTAAAG | 1419 | TGTTAAAG | 2356 | GTTAAAG | 3293 |
| hsa-miR-302e | UAAGUGCUUCCAUGCUU | 483 | GAAGCACTT | 1420 | AAGCACTT | 2357 | AGCACTT | 3294 |
| hsa-miR-3028 | UAAUUGCUUCCAUGUUU | 484 | GAAGCAATT | 1421 | AAGCAATT | 2358 | AGCAATT | 3295 |
| hsa-miR-30a | UGUAAACAUCCUCGACUGGAAG | 485 | GATGTTTAC | 1422 | ATGTTTAC | 2359 | TGTTTAC | 3296 |
| hsa-miR-30a* | CUUUCAGUCGGAUGUUUGCAGC | 486 | CGACTGAAA | 1423 | GACTGAAA | 2360 | ACTGAAA | 3297 |
| hsa-miR-30b | UGUAAACAUCCUACACUCAGCU | 487 | GATGTTTAC | 1424 | ATGTTTAC | 2361 | TGTTTAC | 3298 |
| hsa-miR-30b* | CUGGGAGGUGGAUGUUUACUUC | 488 | CACCTCCCA | 1425 | ACCTCCCA | 2362 | CCTCCCA | 3299 |
| hsa-miR-30c | UGUAAACAUCCUACACUCUCAGC | 489 | GATGTTTAC | 1426 | ATGTTTAC | 2363 | TGTTTAC | 3300 |
| hsa-miR-30c-1* | CUGGGAGAGGGUUGUUUACUCC | 490 | CCTCTCCCA | 1427 | CTCTCCCA | 2364 | TCTCCCA | 3301 |
| hsa-miR-30c-2* | CUGGGAGAAGGCUGUUUACUCU | 491 | CTTCTCCCA | 1428 | TTCTCCCA | 2365 | TCTCCCA | 3302 |
| hsa-miR-30d | UGUAAACAUCCCCGACUGGAAG | 492 | GATGTTTAC | 1429 | ATGTTTAC | 2366 | TGTTTAC | 3303 |
| hsa-miR-30d* | CUUUCAGUCAGAUGUUUGCUGC | 493 | TGACTGAAA | 1430 | GACTGAAA | 2367 | ACTGAAA | 3304 |
| hsa-miR-30e | UGUAAACAUCCUUGACUGGAAG | 494 | GATGTTTAC | 1431 | ATGTTTAC | 2368 | TGTTTAC | 3305 |
| hsa-miR-30e* | CUUUCAGUCGGAUGUUUACAGC | 495 | CGACTGAAA | 1432 | GACTGAAA | 2369 | ACTGAAA | 3306 |
| hsa-miR-31 | AGGCAAGAUGCUGGCAUAGCU | 496 | CATCTTGCC | 1433 | ATCTTGCC | 2370 | TCTTGCC | 3307 |
| hsa-miR-31* | UGCUAUGCCAACAUAUUGCCAU | 497 | TGGCATAGC | 1434 | GGCATAGC | 2371 | GCATAGC | 3308 |
| hsa-miR-32 | UAUUGCACAUUACUAAGUUGCA | 498 | ATGTGCAAT | 1435 | TGTGCAAT | 2372 | GTGCAAT | 3309 |
| hsa-miR-32* | CAAUUUAGUGUGUGUGAUAUUU | 499 | CACTAAATT | 1436 | ACTAAATT | 2373 | CTAAATT | 3310 |
| hsa-miR-320a | AAAAGCUGGGUUGAGAGGGCGA | 500 | CCCAGCTTT | 1437 | CCAGCTTT | 2374 | CAGCTTT | 3311 |
| hsa-miR-320b | AAAAGCUGGGUUGAGAGGGCAA | 501 | CCCAGCTTT | 1438 | CCAGCTTT | 2375 | CAGCTTT | 3312 |
| hsa-miR-320c | AAAAGCUGGGUUGAGAGGGU | 502 | CCCAGCTTT | 1439 | CCAGCTTT | 2376 | CAGCTTT | 3313 |
| hsa-miR-320d | AAAAGCUGGGUUGAGAGGA | 503 | CCCAGCTTT | 1440 | CCAGCTTT | 2377 | CAGCTTT | 3314 |
| hsa-miR-323-3p | CACAUUACACGGUCGACCUCU | 504 | GTGTAATGT | 1441 | TGTAATGT | 2378 | GTAATGT | 3315 |
| hsa-miR-323-5p | AGGUGGUCCGUGGCGCGUUCGC | 505 | CGGACCACC | 1442 | GGACCACC | 2379 | GACCACC | 3316 |
| hsa-miR-324-3p | ACUGCCCCAGGUGCUGCUGG | 506 | CTGGGGCAG | 1443 | TGGGGCAG | 2380 | GGGGCAG | 3317 |
| hsa-miR-324-5p | CGCAUCCCCUAGGGCAUUGGUGU | 507 | AGGGGATGC | 1444 | GGGGATGC | 2381 | GGGATGC | 3318 |
| hsa-miR-325 | CCUAGUAGGUGUCCAGUAAGUGU | 508 | ACCTACTAG | 1445 | CCTACTAG | 2382 | CTACTAG | 3319 |
| hsa-miR-326 | CCUCUGGGCCCUUCCUCCAG | 509 | GGCCCAGAG | 1446 | GCCCAGAG | 2383 | CCCAGAG | 3320 |
| hsa-miR-328 | CUGGCCCUCUCUGCCCUUCCGU | 510 | AGAGGGCCA | 1447 | GAGGGCCA | 2384 | AGGGCCA | 3321 |
| hsa-miR-329 | AACACACCUGGUUAACCUCUUU | 511 | CAGGTGTGT | 1448 | AGGTGTGT | 2385 | GGTGTGT | 3322 |
| hsa-miR-330-3p | GCAAAGCACACGGCCUGCAGAGA | 512 | TGTGCTTTG | 1449 | GTGCTTTG | 2386 | TGCTTTG | 3323 |
| hsa-miR-330-5p | UCUCUGGGCCUGUGUCUUAGGC | 513 | GGCCCAGAG | 1450 | GCCCAGAG | 2387 | CCCAGAG | 3324 |
| hsa-miR-331-3p | GCCCCUGGGCCUAUCCUAGAA | 514 | GCCCAGGGG | 1451 | CCCAGGGG | 2388 | CCAGGGG | 3325 |
| hsa-miR-331-5p | CUAGGUAUGGUCCCAGGGAUCC | 515 | CCATACCTA | 1452 | CATACCTA | 2389 | ATACCTA | 3326 |
| hsa-miR-335 | UCAAGAGCAAUAACGAAAAAUGU | 516 | TTGCTCTTG | 1453 | TGCTCTTG | 2390 | GCTCTTG | 3327 |
| hsa-miR-335* | UUUUUCAUUAUUGCUCCUGACC | 517 | TAATGAAAA | 1454 | AATGAAAA | 2391 | ATGAAAA | 3328 |
| hsa-miR-337-3p | CUCCUAUAUGAUGCCUUUCUUC | 518 | CATATAGGA | 1455 | ATATAGGA | 2392 | TATAGGA | 3329 |
| hsa-miR-337-5p | GAACGGCUUCAUACAGGAGUU | 519 | GAAGCCGTT | 1456 | AAGCCGTT | 2393 | AGCCGTT | 3330 |
| hsa-miR-338-3p | UCCAGCAUCAGUGAUUUUGUUG | 520 | TGATGCTGG | 1457 | GATGCTGG | 2394 | ATGCTGG | 3331 |
| hsa-miR-338-5p | AACAAUAUCCUGGUGCUGAGUG | 521 | GGATATTGT | 1458 | GATATTGT | 2395 | ATATTGT | 3332 |
| hsa-miR-339-3p | UGAGCGCCUCGACGACAGAGCCG | 522 | GAGGCGCTC | 1459 | AGGCGCTC | 2396 | GGCGCTC | 3333 |
| hsa-miR-339-5p | UCCCUGUCCUCCAGGAGCUCACG | 523 | AGGACAGGG | 1460 | GGACAGGG | 2397 | GACAGGG | 3334 |
| hsa-miR-33a | GUGCAUUGUAGUUGCAUUGCA | 524 | TACAATGCA | 1461 | ACAATGCA | 2398 | CAATGCA | 3335 |
| hsa-miR-33a* | CAAUGUUUCCACAGUGCAUCAC | 525 | GGAAACATT | 1462 | GAAACATT | 2399 | AAACATT | 3336 |
| hsa-miR-33b | GUGCAUUGCUGUUGCAUUGC | 526 | AGCAATGCA | 1463 | GCAATGCA | 2400 | CAATGCA | 3337 |
| hsa-miR-33b* | CAGUGCCUCGGCAGUGCAGCCC | 527 | CGAGGCACT | 1464 | GAGGCACT | 2401 | AGGCACT | 3338 |
| hsa-miR-340 | UUAUAAAGCAAUGAGACUGAUU | 528 | TGCTTTATA | 1465 | GCTTTATA | 2402 | CTTTATA | 3339 |
| hsa-miR-340* | UCCGUCUCAGUUACUUUAUAGC | 529 | CTGAGACGG | 1466 | TGAGACGG | 2403 | GAGACGG | 3340 |
| hsa-miR-342-3p | UCUCACACAGAAAUCGCACCCGU | 530 | CTGTGTGAG | 1467 | TGTGTGAG | 2404 | GTGTGAG | 3341 |
| hsa-miR-342-5p | AGGGGUGCUAUCUGUGAUUGA | 531 | TAGCACCCC | 1468 | AGCACCCC | 2405 | GCACCCC | 3342 |
| hsa-miR-345 | GCUGACUCCUAGUCCAGGGCUC | 532 | AGGAGTCAG | 1469 | GGAGTCAG | 2406 | GAGTCAG | 3343 |
| hsa-miR-346 | UGUCUGCCCGCAUGCCUGCCUCU | 533 | CGGGCAGAC | 1470 | GGGCAGAC | 2407 | GGCAGAC | 3344 |
| hsa-miR-34a | UGGCAGUGUCUUAGCUGGUUGU | 534 | GACACTGCC | 1471 | ACACTGCC | 2408 | CACTGCC | 3345 |
| hsa-miR-34a* | CAAUCAGCAAGUAUACUGCCCU | 535 | TTGCTGATT | 1472 | TGCTGATT | 2409 | GCTGATT | 3346 |
| hsa-miR-34b | CAAUCACUAACUCCACUGCCAU | 536 | TTAGTGATT | 1473 | TAGTGATT | 2410 | AGTGATT | 3347 |
| hsa-miR-34b* | UAGGCAGUGUCAUUAGCUGAUUG | 537 | ACACTGCCT | 1474 | CACTGCCT | 2411 | ACTGCCT | 3348 |
| hsa-miR-34c-3p | AAUCACUAACCACACGGCCAGG | 538 | GTTAGTGAT | 1475 | TTAGTGAT | 2412 | TAGTGAT | 3349 |
| hsa-miR-34c-5p | AGGCAGUGUAGUUAGCUGAUUGC | 539 | TACACTGCC | 1476 | ACACTGCC | 2413 | CACTGCC | 3350 |
| hsa-miR-361-3p | UCCCCCAGGUGUGAUUCUGAUUU | 540 | ACCTGGGGG | 1477 | CCTGGGGG | 2414 | CTGGGGG | 3351 |
| hsa-miR-361-5p | UUAUCAGAAUCUCCAGGGGUAC | 541 | ATTCTGATA | 1478 | TTCTGATA | 2415 | TCTGATA | 3352 |
| hsa-miR-362-3p | AACACACCUAUUCAAGGAUUCA | 542 | TAGGTGTGT | 1479 | AGGTGTGT | 2416 | GGTGTGT | 3353 |
| hsa-miR-362-5p | AAUCCUUGGAACCUAGGUGUGAGU | 543 | TCCAAGGAT | 1480 | CCAAGGAT | 2417 | CAAGGAT | 3354 |
| hsa-miR-363 | AAUUGCACGGUAUCCAUCUGUA | 544 | CCGTGCAAT | 1481 | CGTGCAAT | 2418 | GTGCAAT | 3355 |
| hsa-miR-363* | CGGGUGGAUCACGAUGCAAUUU | 545 | GATCCACCC | 1482 | ATCCACCC | 2419 | TCCACCC | 3356 |
| hsa-miR-365 | UAAUGCCCCUAAAAAUCCUUAU | 546 | AGGGGCATT | 1483 | GGGGCATT | 2420 | GGGCATT | 3357 |
| hsa-miR-367 | AAUUGCACUUUAGCAAUGGUGA | 547 | AAGTGCAAT | 1484 | AGTGCAAT | 2421 | GTGCAAT | 3358 |
| hsa-miR-367* | ACUGUUGCUAAUAUGCAACUCU | 548 | TAGCAACAG | 1485 | AGCAACAG | 2422 | GCAACAG | 3359 |
| hsa-miR-369-3p | AAUAAUACAUGGUUGAUCUUU | 549 | ATGTATTAT | 1486 | TGTATTAT | 2423 | GTATTAT | 3360 |
| hsa-miR-369-5p | AGAUCGACCGUGUUAUAUUCGC | 550 | CGGTCGATC | 1487 | GGTCGATC | 2424 | GTCGATC | 3361 |
| hsa-miR-370 | GCCUGCUGGGGUGGAACCUGGU | 551 | CCCAGCAGG | 1488 | CCAGCAGG | 2425 | CAGCAGG | 3362 |
| hsa-miR-371-3p | AAGUGCCGCCAUCUUUUGAGUGU | 552 | GGCGGCACT | 1489 | GCGGCACT | 2426 | CGGCACT | 3363 |
| hsa-miR-371-5p | ACUCAAACUGUGGGGGCACU | 553 | CAGTTTGAG | 1490 | AGTTTGAG | 2427 | GTTTGAG | 3364 |
| hsa-miR-372 | AAAGUGCUGCGACAUUUGAGCGU | 554 | GCAGCACTT | 1491 | CAGCACTT | 2428 | AGCACTT | 3365 |
| hsa-miR-373 | GAAGUGCUUCGAUUUUGGGGUGU | 555 | GAAGCACTT | 1492 | AAGCACTT | 2429 | AGCACTT | 3366 |
| hsa-miR-373* | ACUCAAAAUGGGGGCGCUUUCC | 556 | CATTTTGAG | 1493 | ATTTTGAG | 2430 | TTTTGAG | 3367 |
| hsa-miR-374a | UUAUAAUACAACCUGAUAAGUG | 557 | TGTATTATA | 1494 | GTATTATA | 2431 | TATTATA | 3368 |
| hsa-miR-374a* | CUUAUCAGAUUGUAUUGUAAUU | 558 | ATCTGATAA | 1495 | TCTGATAA | 2432 | CTGATAA | 3369 |
| hsa-miR-374b | AUAUAAUACAACCUGCUAAGUG | 559 | TGTATTATA | 1496 | GTATTATA | 2433 | TATTATA | 3370 |
| hsa-miR-374b* | CUUAGCAGGUUGUAUUAUCAUU | 560 | ACCTGCTAA | 1497 | CCTGCTAA | 2434 | CTGCTAA | 3371 |
| hsa-miR-375 | UUUGUUCGUUCGGCUCGCGUGA | 561 | AACGAACAA | 1498 | ACGAACAA | 2435 | CGAACAA | 3372 |
| hsa-miR-376a | AUCAUAGAGGAAAAUCCACGU | 562 | CCTCTATGA | 1499 | CTCTATGA | 2436 | TCTATGA | 3373 |
| hsa-miR-376a* | GUAGAUUCUCCUUCUAUGAGUA | 563 | GAGAATCTA | 1500 | AGAATCTA | 2437 | GAATCTA | 3374 |
| hsa-miR-376b | AUCAUAGAGGAAAAUCCAUGUU | 564 | CCTCTATGA | 1501 | CTCTATGA | 2438 | TCTATGA | 3375 |
| hsa-miR-376c | AACAUAGAGGAAAUUCCACGU | 565 | CCTCTATGT | 1502 | CTCTATGT | 2439 | TCTATGT | 3376 |
| hsa-miR-377 | AUCACACAAAGGCAACUUUUGU | 566 | TTTGTGTGA | 1503 | TTGTGTGA | 2440 | TGTGTGA | 3377 |
| hsa-miR-377* | AGAGGUUGCCCUUGGUGAAUUC | 567 | GGCAACCTC | 1504 | GCAACCTC | 2441 | CAACCTC | 3378 |
| hsa-miR-378 | ACUGGACUUGGAGUCAGAAGG | 568 | CAAGTCCAG | 1505 | AAGTCCAG | 2442 | AGTCCAG | 3379 |
| hsa-miR-378* | CUCCUGACUCCAGGUCCUGUGU | 569 | GAGTCAGGA | 1506 | AGTCAGGA | 2443 | GTCAGGA | 3380 |
| hsa-miR-379 | UGGUAGACUAUGGAACGUAGG | 570 | TAGTCTACC | 1507 | AGTCTACC | 2444 | GTCTACC | 3381 |
| hsa-miR-379* | UAUGUAACAUGGUCCACUAACU | 571 | ATGTTACAT | 1508 | TGTTACAT | 2445 | GTTACAT | 3382 |
| hsa-miR-380 | UAUGUAAUAUGGUCCACAUCUU | 572 | ATATTACAT | 1509 | TATTACAT | 2446 | ATTACAT | 3383 |
| hsa-miR-380* | UGGUUGACCAUAGAACAUGCGC | 573 | TGGTCAACC | 1510 | GGTCAACC | 2447 | GTCAACC | 3384 |
| hsa-miR-381 | UAUACAAGGGCAAGCUCUCUGU | 574 | CCCTTGTAT | 1511 | CCTTGTAT | 2448 | CTTGTAT | 3385 |
| hsa-miR-382 | GAAGUUGUUCGUGGUGGAUUCG | 575 | GAACAACTT | 1512 | AACAACTT | 2449 | ACAACTT | 3386 |
| hsa-miR-383 | AGAUCAGAAGGUGAUUGUGGCU | 576 | CTTCTGATC | 1513 | TTCTGATC | 2450 | TCTGATC | 3387 |
| hsa-miR-384 | AUUCCUAGAAAUUGUUCAUA | 577 | TTCTAGGAA | 1514 | TCTAGGAA | 2451 | CTAGGAA | 3388 |
| hsa-miR-409-3p | GAAUGUUGCUCGGUGAACCCCU | 578 | AGCAACATT | 1515 | GCAACATT | 2452 | CAACATT | 3389 |
| hsa-miR-409-5p | AGGUUACCCGAGCAACUUUGCAU | 579 | CGGGTAACC | 1516 | GGGTAACC | 2453 | GGTAACC | 3390 |
| hsa-miR-410 | AAUAUAACACAGAUGGCCUGU | 580 | GTGTTATAT | 1517 | TGTTATAT | 2454 | GTTATAT | 3391 |
| hsa-miR-411 | UAGUAGACCGUAUAGCGUACG | 581 | CGGTCTACT | 1518 | GGTCTACT | 2455 | GTCTACT | 3392 |
| hsa-miR-411* | UAUGUAACACGGUCCACUAACC | 582 | GTGTTACAT | 1519 | TGTTACAT | 2456 | GTTACAT | 3393 |
| hsa-miR-412 | ACUUCACCUGGUCCACUAGCCGU | 583 | CAGGTGAAG | 1520 | AGGTGAAG | 2457 | GGTGAAG | 3394 |
| hsa-miR-421 | AUCAACAGACAUUAAUUGGGCGC | 584 | GTCTGTTGA | 1521 | TCTGTTGA | 2458 | CTGTTGA | 3395 |
| hsa-miR-422a | ACUGGACUUAGGGUCAGAAGGC | 585 | TAAGTCCAG | 1522 | AAGTCCAG | 2459 | AGTCCAG | 3396 |
| hsa-miR-423-3p | AGCUCGGUCUGAGGCCCCUCAGU | 586 | AGACCGAGC | 1523 | GACCGAGC | 2460 | ACCGAGC | 3397 |
| hsa-miR-423-5p | UGAGGGGCAGAGAGCGAGACUUU | 587 | CTGCCCCTC | 1524 | TGCCCCTC | 2461 | GCCCCTC | 3398 |
| hsa-miR-424 | CAGCAGCAAUUCAUGUUUUGAA | 588 | ATTGCTGCT | 1525 | TTGCTGCT | 2462 | TGCTGCT | 3399 |
| hsa-miR-424* | CAAAACGUGAGGCGCUGCUAU | 589 | TCACGTTTT | 1526 | CACGTTTT | 2463 | ACGTTTT | 3400 |
| hsa-miR-425 | AAUGACACGAUCACUCCCGUUGA | 590 | TCGTGTCAT | 1527 | CGTGTCAT | 2464 | GTGTCAT | 3401 |
| hsa-miR-425* | AUCGGGAAUGUCGUGUCCGCCC | 591 | CATTCCCGA | 1528 | ATTCCCGA | 2465 | TTCCCGA | 3402 |
| hsa-miR-429 | UAAUACUGUCUGGUAAAACCGU | 592 | GACAGTATT | 1529 | ACAGTATT | 2466 | CAGTATT | 3403 |
| hsa-miR-431 | UGUCUUGCAGGCCGUCAUGCA | 593 | CTGCAAGAC | 1530 | TGCAAGAC | 2467 | GCAAGAC | 3404 |
| hsa-miR-431* | CAGGUCGUCUUGCAGGGCUUCU | 594 | AGACGACCT | 1531 | GACGACCT | 2468 | ACGACCT | 3405 |
| hsa-miR-432 | UCUUGGAGUAGGUCAUUGGGUGG | 595 | TACTCCAAG | 1532 | ACTCCAAG | 2469 | CTCCAAG | 3406 |
| hsa-miR-432* | CUGGAUGGCUCCUCCAUGUCU | 596 | AGCCATCCA | 1533 | GCCATCCA | 2470 | CCATCCA | 3407 |
| hsa-miR-433 | AUCAUGAUGGGCUCCUCGGUGU | 597 | CCATCATGA | 1534 | CATCATGA | 2471 | ATCATGA | 3408 |
| hsa-miR-448 | UUGCAUAUGUAGGAUGUCCCAU | 598 | ACATATGCA | 1535 | CATATGCA | 2472 | ATATGCA | 3409 |
| hsa-miR-449a | UGGCAGUGUAUUGUUAGCUGGU | 599 | TACACTGCC | 1536 | ACACTGCC | 2473 | CACTGCC | 3410 |
| hsa-miR-449b | AGGCAGUGUAUUGUUAGCUGGC | 600 | TACACTGCC | 1537 | ACACTGCC | 2474 | CACTGCC | 3411 |
| hsa-miR-450a | UUUUGCGAUGUGUUCCUAAUAU | 601 | CATCGCAAA | 1538 | ATCGCAAA | 2475 | TCGCAAA | 3412 |
| hsa-miR-450b-3p | UUGGGAUCAUUUUGCAUCCAUA | 602 | ATGATCCCA | 1539 | TGATCCCA | 2476 | GATCCCA | 3413 |
| hsa-miR-450b-5p | UUUUGCAAUAUGUUCCUGAAUA | 603 | TATTGCAAA | 1540 | ATTGCAAA | 2477 | TTGCAAA | 3414 |
| hsa-miR-451 | AAACCGUUACCAUUACUGAGUU | 604 | GTAACGGTT | 1541 | TAACGGTT | 2478 | AACGGTT | 3415 |
| hsa-miR-452 | AACUGUUUGCAGAGGAAACUGA | 605 | GCAAACAGT | 1542 | CAAACAGT | 2479 | AAACAGT | 3416 |
| hsa-miR-452* | CUCAUCUGCAAAGAAGUAAGUG | 606 | TGCAGATGA | 1543 | GCAGATGA | 2480 | CAGATGA | 3417 |
| hsa-miR-453 | AGGUUGUCCGUGGUGAGUUCGCA | 607 | CGGACAACC | 1544 | GGACAACC | 2481 | GACAACC | 3418 |
| hsa-miR-454 | UAGUGCAAUAUUGCUUAUAGGGU | 608 | TATTGCACT | 1545 | ATTGCACT | 2482 | TTGCACT | 3419 |
| hsa-miR-454* | ACCCUAUCAAUAUUGUCUCUGC | 609 | TTGATAGGG | 1546 | TGATAGGG | 2483 | GATAGGG | 3420 |
| hsa-miR-455-3p | GCAGUCCAUGGGCAUAUACAC | 610 | CATGGACTG | 1547 | ATGGACTG | 2484 | TGGACTG | 3421 |
| hsa-miR-455-5p | UAUGUGCCUUUGGACUACAUCG | 611 | AAGGCACAT | 1548 | AGGCACAT | 2485 | GGCACAT | 3422 |
| hsa-miR-483-3p | UCACUCCUCUCCUCCCGUCUU | 612 | AGAGGAGTG | 1549 | GAGGAGTG | 2486 | AGGAGTG | 3423 |
| hsa-miR-483-5p | AAGACGGGAGGAAAGAAGGGAG | 613 | CTCCCGTCT | 1550 | TCCCGTCT | 2487 | CCCGTCT | 3424 |
| hsa-miR-484 | UCAGGCUCAGUCCCCUCCCGAU | 614 | CTGAGCCTG | 1551 | TGAGCCTG | 2488 | GAGCCTG | 3425 |
| hsa-miR-485-3p | GUCAUACACGGCUCUCCUCUCU | 615 | CGTGTATGA | 1552 | GTGTATGA | 2489 | TGTATGA | 3426 |
| hsa-miR-485-5p | AGAGGCUGGCCGUGAUGAAUUC | 616 | GCCAGCCTC | 1553 | CCAGCCTC | 2490 | CAGCCTC | 3427 |
| hsa-miR-486-3p | CGGGGCAGCUCAGUACAGGAU | 617 | AGCTGCCCC | 1554 | GCTGCCCC | 2491 | CTGCCCC | 3428 |
| hsa-miR-486-5p | UCCUGUACUGAGCUGCCCCGAG | 618 | CAGTACAGG | 1555 | AGTACAGG | 2492 | GTACAGG | 3429 |
| hsa-miR-487a | AAUCAUACAGGGACAUCCAGUU | 619 | CTGTATGAT | 1556 | TGTATGAT | 2493 | GTATGAT | 3430 |
| hsa-miR-487b | AAUCGUACAGGGUCAUCCACUU | 620 | CTGTACGAT | 1557 | TGTACGAT | 2494 | GTACGAT | 3431 |
| hsa-miR-488 | UUGAAAGGCUAUUUCUUGGUC | 621 | AGCCTTTCA | 1558 | GCCTTTCA | 2495 | CCTTTCA | 3432 |
| hsa-miR-488* | CCCAGAUAAUGGCACUCUCAA | 622 | ATTATCTGG | 1559 | TTATCTGG | 2496 | TATCTGG | 3433 |
| hsa-miR-489 | GUGACAUCACAUAUACGGCAGC | 623 | GTGATGTCA | 1560 | TGATGTCA | 2497 | GATGTCA | 3434 |
| hsa-miR-490-3p | CAACCUGGAGGACUCCAUGCUG | 624 | CTCCAGGTT | 1561 | TCCAGGTT | 2498 | CCAGGTT | 3435 |
| hsa-miR-490-5p | CCAUGGAUCUCCAGGUGGGU | 625 | AGATCCATG | 1562 | GATCCATG | 2499 | ATCCATG | 3436 |
| hsa-miR-491-3p | CUUAUGCAAGAUUCCCUUCUAC | 626 | CTTGCATAA | 1563 | TTGCATAA | 2500 | TGCATAA | 3437 |
| hsa-miR-491-5p | AGUGGGGAACCCUUCCAUGAGG | 627 | GTTCCCCAC | 1564 | TTCCCCAC | 2501 | TCCCCAC | 3438 |
| hsa-miR-492 | AGGACCUGCGGGACAAGAUUCUU | 628 | CGCAGGTCC | 1565 | GCAGGTCC | 2502 | CAGGTCC | 3439 |
| hsa-miR-493 | UGAAGGUCUACUGUGUGCCAGG | 629 | TAGACCTTC | 1566 | AGACCTTC | 2503 | GACCTTC | 3440 |
| hsa-miR-493* | UUGUACAUGGUAGGCUUUCAUU | 630 | CCATGTACA | 1567 | CATGTACA | 2504 | ATGTACA | 3441 |
| hsa-miR-494 | UGAAACAUACACGGGAAACCUC | 631 | GTATGTTTC | 1568 | TATGTTTC | 2505 | ATGTTTC | 3442 |
| hsa-miR-495 | AAACAAACAUGGUGCACUUCUU | 632 | ATGTTTGTT | 1569 | TGTTTGTT | 2506 | GTTTGTT | 3443 |
| hsa-miR-496 | UGAGUAUUACAUGGCCAAUCUC | 633 | GTAATACTC | 1570 | TAATACTC | 2507 | AATACTC | 3444 |
| hsa-miR-497 | CAGCAGCACACUGUGGUUUGU | 634 | TGTGCTGCT | 1571 | GTGCTGCT | 2508 | TGCTGCT | 3445 |
| hsa-miR-497* | CAAACCACACUGUGGUGUUAGA | 635 | GTGTGGTTT | 1572 | TGTGGTTT | 2509 | GTGGTTT | 3446 |
| hsa-miR-498 | UUUCAAGCCAGGGGGCGUUUUUC | 636 | TGGCTTGAA | 1573 | GGCTTGAA | 2510 | GCTTGAA | 3447 |
| hsa-miR-499-3p | AACAUCACAGCAAGUCUGUGCU | 637 | CTGTGATGT | 1574 | TGTGATGT | 2511 | GTGATGT | 3448 |
| hsa-miR-499-5p | UUAAGACUUGCAGUGAUGUUU | 638 | CAAGTCTTA | 1575 | AAGTCTTA | 2512 | AGTCTTA | 3449 |
| hsa-miR-500 | UAAUCCUUGCUACCUGGGUGAGA | 639 | GCAAGGATT | 1576 | CAAGGATT | 2513 | AAGGATT | 3450 |
| hsa-miR-500* | AUGCACCUGGGCAAGGAUUCUG | 640 | CCAGGTGCA | 1577 | CAGGTGCA | 2514 | AGGTGCA | 3451 |
| hsa-miR-501-3p | AAUGCACCCGGGCAAGGAUUCU | 641 | CGGGTGCAT | 1578 | GGGTGCAT | 2515 | GGTGCAT | 3452 |
| hsa-miR-501-5p | AAUCCUUUGUCCCUGGGUGAGA | 642 | ACAAAGGAT | 1579 | CAAAGGAT | 2516 | AAAGGAT | 3453 |
| hsa-miR-502-3p | AAUGCACCUGGGCAAGGAUUCA | 643 | CAGGTGCAT | 1580 | AGGTGCAT | 2517 | GGTGCAT | 3454 |
| hsa-miR-502-5p | AUCCUUGCUAUCUGGGUGCUA | 644 | TAGCAAGGA | 1581 | AGCAAGGA | 2518 | GCAAGGA | 3455 |
| hsa-miR-503 | UAGCAGCGGGAACAGUUCUGCAG | 645 | CCCGCTGCT | 1582 | CCGCTGCT | 2519 | CGCTGCT | 3456 |
| hsa-miR-504 | AGACCCUGGUCUGCACUCUAUC | 646 | ACCAGGGTC | 1583 | CCAGGGTC | 2520 | CAGGGTC | 3457 |
| hsa-miR-505 | CGUCAACACUUGCUGGUUUCCU | 647 | AGTGTTGAC | 1584 | GTGTTGAC | 2521 | TGTTGAC | 3458 |
| hsa-miR-505* | GGGAGCCAGGAAGUAUUGAUGU | 648 | CCTGGCTCC | 1585 | CTGGCTCC | 2522 | TGGCTCC | 3459 |
| hsa-miR-506 | UAAGGCACCCUUCUGAGUAGA | 649 | GGGTGCCTT | 1586 | GGTGCCTT | 2523 | GTGCCTT | 3460 |
| hsa-miR-507 | UUUUGCACCUUUUGGAGUGAA | 650 | AGGTGCAAA | 1587 | GGTGCAAA | 2524 | GTGCAAA | 3461 |
| hsa-miR-508-3p | UGAUUGUAGCCUUUUGGAGUAGA | 651 | GCTACAATC | 1588 | CTACAATC | 2525 | TACAATC | 3462 |
| hsa-miR-508-5p | UACUCCAGAGGGCGUCACUCAUG | 652 | CTCTGGAGT | 1589 | TCTGGAGT | 2526 | CTGGAGT | 3463 |
| hsa-miR-509-3-5p | UACUGCAGACGUGGCAAUCAUG | 653 | GTCTGCAGT | 1590 | TCTGCAGT | 2527 | CTGCAGT | 3464 |
| hsa-miR-509-3p | UGAUUGGUACGUCUGUGGGUAG | 654 | GTACCAATC | 1591 | TACCAATC | 2528 | ACCAATC | 3465 |
| hsa-miR-509-5p | UACUGCAGACAGUGGCAAUCA | 655 | GTCTGCAGT | 1592 | TCTGCAGT | 2529 | CTGCAGT | 3466 |
| hsa-miR-510 | UACUCAGGAGAGUGGCAAUCAC | 656 | CTCCTGAGT | 1593 | TCCTGAGT | 2530 | CCTGAGT | 3467 |
| hsa-miR-511 | GUGUCUUUUGCUCUGCAGUCA | 657 | CAAAAGACA | 1594 | AAAAGACA | 2531 | AAAGACA | 3468 |
| hsa-miR-512-3p | AAGUGCUGUCAUAGCUGAGGUC | 658 | GACAGCACT | 1595 | ACAGCACT | 2532 | CAGCACT | 3469 |
| hsa-miR-512-5p | CACUCAGCCUUGAGGGCACUUUC | 659 | AGGCTGAGT | 1596 | GGCTGAGT | 2533 | GCTGAGT | 3470 |
| hsa-miR-513a-3p | UAAAUUUCACCUUUCUGAGAAGG | 660 | GTGAAATTT | 1597 | TGAAATTT | 2534 | GAAATTT | 3471 |
| hsa-miR-513a-5p | UUCACAGGGAGGUGUCAU | 661 | TCCCTGTGA | 1598 | CCCTGTGA | 2535 | CCTGTGA | 3472 |
| hsa-miR-513b | UUCACAAGGAGGUGUCAUUUAU | 662 | TCCTTGTGA | 1599 | CCTTGTGA | 2536 | CTTGTGA | 3473 |
| hsa-miR-513c | UUCUCAAGGAGGUGUCGUUUAU | 663 | TCCTTGAGA | 1600 | CCTTGAGA | 2537 | CTTGAGA | 3474 |
| hsa-miR-514 | AUUGACACUUCUGUGAGUAGA | 664 | AAGTGTCAA | 1601 | AGTGTCAA | 2538 | GTGTCAA | 3475 |
| hsa-miR-515-3p | GAGUGCCUUCUUUUGGAGCGUU | 665 | GAAGGCACT | 1602 | AGGCACT | 2539 | AGGCACT | 3476 |
| hsa-miR-515-5p | UUCUCCAAAAGAAAGCACUUUCUG | 666 | TTTTGGAGA | 1603 | TTTGGAGA | 2540 | TTGGAGA | 3477 |
| hsa-miR-516a-3p | UGCUUCCUUUCAGAGGGU | 667 | AAAGGAAGC | 1604 | AAGGAAGC | 2541 | AGGAAGC | 3478 |
| hsa-miR-516a-5p | UUCUCGAGGAAAGAAGCACUUUC | 668 | TCCTCGAGA | 1605 | CCTCGAGA | 2542 | CTCGAGA | 3479 |
| hsa-miR-516b | AUCUGGAGGUAAGAAGCACUUU | 669 | ACCTCCAGA | 1606 | CCTCCAGA | 2543 | CTCCAGA | 3480 |
| hsa-miR-517* | CCUCUAGAUGGAAGCACUGUCU | 670 | CATCTAGAG | 1607 | ATCTAGAG | 2544 | TCTAGAG | 3481 |
| hsa-miR-517a | AUCGUGCAUCCCUUUAGAGUGU | 671 | GATGCACGA | 1608 | ATGCACGA | 2545 | TGCACGA | 3482 |
| hsa-miR-517b | UCGUGCAUCCCUUUAGAGUGUU | 672 | GGATGCACG | 1609 | GATGCACG | 2546 | ATGCACG | 3483 |
| hsa-miR-517c | AUCGUGCAUCCUUUUAGAGUGU | 673 | GATGCACGA | 1610 | ATGCACGA | 2547 | TGCACGA | 3484 |
| hsa-miR-518a-3p | GAAAGCGCUUCCCUUUGCUGGA | 674 | AAGCGCTTT | 1611 | AGCGCTTT | 2548 | GCGCTTT | 3485 |
| hsa-miR-518b | CAAAGCGCUCCCCUUUAGAGGU | 675 | GAGCGCTTT | 1612 | AGCGCTTT | 2549 | GCGCTTT | 3486 |
| hsa-miR-518c | CAAAGCGCUUCUCUUUAGAGUGU | 676 | AAGCGCTTT | 1613 | AGCGCTTT | 2550 | GCGCTTT | 3487 |
| hsa-miR-518c* | UCUCUGGAGGGAAGCACUUUCUG | 677 | CCTCCAGAG | 1614 | CTCCAGAG | 2551 | TCCAGAG | 3488 |
| hsa-miR-518d-3p | CAAAGCGCUUCCCUUUGGAGC | 678 | AAGCGCTTT | 1615 | AGCGCTTT | 2552 | GCGCTTT | 3489 |
| hsa-miR-518d-5p | CUCUAGAGGGAAGCACUUUCUG | 679 | CCCTCTAGA | 1616 | CCTCTAGA | 2553 | CTCTAGA | 3490 |
| hsa-miR-518e | AAAGCGCUUCCCUUCAGAGUG | 680 | GAAGCGCTT | 1617 | AAGCGCTT | 2554 | AGCGCTT | 3491 |
| hsa-miR-518f | GAAAGCGCUUCUCUUUAGAGG | 681 | AAGCGCTTT | 1618 | AGCGCTTT | 2555 | GCGCTTT | 3492 |
| hsa-miR-518f* | CUCUAGAGGGAAGCACUUUCUC | 682 | CCCTCTAGA | 1619 | CCTCTAGA | 2556 | CTCTAGA | 3493 |
| hsa-miR-519a | AAAGUGCAUCCUUUUAGAGUGU | 683 | GATGCACTT | 1620 | ATGCACTT | 2557 | TGCACTT | 3494 |
| hsa-miR-519a* | CUCUAGAGGGAAGCGCUUUCUG | 684 | CCCTCTAGA | 1621 | CCTCTAGA | 2558 | CTCTAGA | 3495 |
| hsa-miR-519b-3p | AAAGUGCAUCCUUUUAGAGGUU | 685 | GATGCACTT | 1622 | ATGCACTT | 2559 | TGCACTT | 3496 |
| hsa-miR-519c-3p | AAAGUGCAUCUUUUUAGAGGAU | 686 | GATGCACTT | 1623 | ATGCACTT | 2560 | TGCACTT | 3497 |
| hsa-miR-519d | CAAAGUGCCUCCCUUUAGAGUG | 687 | AGGCACTTT | 1624 | GGCACTTT | 2561 | GCACTTT | 3498 |
| hsa-miR-519e | AAGUGCCUCCUUUUAGAGUGUU | 688 | GGAGGCACT | 1625 | GAGGCACT | 2562 | AGGCACT | 3499 |
| hsa-miR-519e* | UUCUCCAAAAGGGAGCACUUUC | 689 | TTTTGGAGA | 1626 | TTTGGAGA | 2563 | TTGGAGA | 3500 |
| hsa-miR-520a-3p | AAAGUGCUUCCCUUUGGACUGU | 690 | GAAGCACTT | 1627 | AAGCACTT | 2564 | AGCACTT | 3501 |
| hsa-miR-520a-5p | CUCCAGAGGGAAGUACUUUCU | 691 | CCCTCTGGA | 1628 | CCTCTGGA | 2565 | CTCTGGA | 3502 |
| hsa-miR-520b | AAAGUGCUUCCUUUUAGAGGG | 692 | GAAGCACTT | 1629 | AAGCACTT | 2566 | AGCACTT | 3503 |
| hsa-miR-520c-3p | AAAGUGCUUCCUUUUAGAGGGU | 693 | GAAGCACTT | 1630 | AAGCACTT | 2567 | AGCACTT | 3504 |
| hsa-miR-520d-3p | AAAGUGCUUCUCUUUGGUGGGU | 694 | GAAGCACTT | 1631 | AAGCACTT | 2568 | AGCACTT | 3505 |
| hsa-miR-520d-5p | CUACAAAGGGAAGCCCUUUC | 695 | CCCTTTGTA | 1632 | CCTTTGTA | 2569 | CTTTGTA | 3506 |
| hsa-miR-520e | AAAGUGCUUCCUUUUUGAGGG | 696 | GAAGCACTT | 1633 | AAGCACTT | 2570 | AGCACTT | 3507 |
| hsa-miR-520f | AAGUGCUUCCUUUUAGAGGGUU | 697 | GGAAGCACT | 1634 | GAAGCACT | 2571 | AAGCACT | 3508 |
| hsa-miR-520g | ACAAAGUGCUUCCCUUUAGAGUGU | 698 | AGCACTTTG | 1635 | GCACTTTG | 2572 | CACTTTG | 3509 |
| hsa-miR-520h | ACAAAGUGCUUCCCUUUAGAGU | 699 | AGCACTTTG | 1636 | GCACTTTG | 2573 | CACTTTG | 3510 |
| hsa-miR-521 | AACGCACUUCCCUUUAGAGUGU | 700 | GAAGTGCGT | 1637 | AAGTGCGT | 2574 | AGTGCGT | 3511 |
| hsa-miR-522 | AAAAUGGUUCCCUUUAGAGUGU | 701 | GAACCATTT | 1638 | AACCATTT | 2575 | ACCATTT | 3512 |
| hsa-miR-523 | GAACGCGCUUCCCUAUAGAGGGU | 702 | AAGCGCGTT | 1639 | AGCGCGTT | 2576 | GCGCGTT | 3513 |
| hsa-miR-524-3p | GAAGGCGCUUCCCUUUGGAGU | 703 | AAGCGCCTT | 1640 | AGCGCCTT | 2577 | GCGCCTT | 3514 |
| hsa-miR-524-5p | CUACAAAGGGAAGCACUUUCUC | 704 | CCCTTTGTA | 1641 | CCTTTGTA | 2578 | CTTTGTA | 3515 |
| hsa-miR-525-3p | GAAGGCGCUUCCCUUUAGAGCG | 705 | AAGCGCCTT | 1642 | AGCGCCTT | 2579 | GCGCCTT | 3516 |
| hsa-miR-525-5p | CUCCAGAGGGAUGCACUUUCU | 706 | CCCTCTGGA | 1643 | CCTCTGGA | 2580 | CTCTGGA | 3517 |
| hsa-miR-526b | CUCUUGAGGGAAGCACUUUCUGU | 707 | CCCTCAAGA | 1644 | CCTCAAGA | 2581 | CTCAAGA | 3518 |
| hsa-miR-526b* | GAAAGUGCUUCCUUUUAGAGGC | 708 | AAGCACTTT | 1645 | AGCACTTT | 2582 | GCACTTT | 3519 |
| hsa-miR-527 | CUGCAAAGGGAAGCCCUUUC | 709 | CCCTTTGCA | 1646 | CCTTTGCA | 2583 | CTTTGCA | 3520 |
| hsa-miR-532-3p | CCUCCCACACCCAAGGCUUGCA | 710 | GTGTGGGAG | 1647 | TGTGGGAG | 2584 | GTGGGAG | 3521 |
| hsa-miR-532-5p | CAUGCCUUGAGUGUAGGACCGU | 711 | TCAAGGCAT | 1648 | CAAGGCAT | 2585 | AAGGCAT | 3522 |
| hsa-miR-539 | GGAGAAAUUAUCCUUGGUGUGU | 712 | TAATTTCTC | 1649 | AATTTCTC | 2586 | ATTTCTC | 3523 |
| hsa-miR-541 | UGGUGGGCACAGAAUCUGGACU | 713 | GTGCCCACC | 1650 | TGCCCACC | 2587 | GCCCACC | 3524 |
| hsa-miR-541* | AAAGGAUUCUGCUGUCGGUCCCACU | 714 | AGAATCCTT | 1651 | GAATCCTT | 2588 | AATCCTT | 3525 |
| hsa-miR-542-3p | UGUGACAGAUUGAUAACUGAAA | 715 | ATCTGTCAC | 1652 | TCTGTCAC | 2589 | CTGTCAC | 3526 |
| hsa-miR-542-5p | UCGGGGAUCAUCAUGUCACGAGA | 716 | TGATCCCCG | 1653 | GATCCCCG | 2590 | ATCCCCG | 3527 |
| hsa-miR-543 | AAACAUUCGCGGUGCACUUCUU | 717 | GCGAATGTT | 1654 | CGAATGTT | 2591 | GAATGTT | 3528 |
| hsa-miR-544 | AUUCUGCAUUUUUAGCAAGUUC | 718 | AATGCAGAA | 1655 | ATGCAGAA | 2592 | TGCAGAA | 3529 |
| hsa-miR-545 | UCAGCAAACAUUUAUUGUGUGC | 719 | TGTTTGCTG | 1656 | GTTTGCTG | 2593 | TTTGCTG | 3530 |
| hsa-miR-545* | UCAGUAAAUGUUUAUUAGAUGA | 720 | CATTTACTG | 1657 | ATTTACTG | 2594 | TTTACTG | 3531 |
| hsa-miR-548a-3p | CAAAACUGGCAAUUACUUUUGC | 721 | GCCAGTTTT | 1658 | CCAGTTTT | 2595 | CAGTTTT | 3532 |
| hsa-miR-548a-5p | AAAAGUAAUUGCGAGUUUUACC | 722 | AATTACTTT | 1659 | ATTACTTT | 2596 | TTACTTT | 3533 |
| hsa-miR-548b-3p | CAAGAACCUCAGUUGCUUUUGU | 723 | GAGGTTCTT | 1660 | AGGTTCTT | 2597 | GGTTCTT | 3534 |
| hsa-miR-548b-5p | AAAAGUAAUUGUGGUUUUGGCC | 724 | AATTACTTT | 1661 | ATTACTTT | 2598 | TTACTTT | 3535 |
| hsa-miR-548c-3p | CAAAAAUCUCAAUUACUUUUGC | 725 | GAGATTTTT | 1662 | AGATTTTT | 2599 | GATTTTT | 3536 |
| hsa-miR-548c-5p | AAAAGUAAUUGCGGUUUUUGCC | 726 | AATTACTTT | 1663 | ATTACTTT | 2600 | TTACTTT | 3537 |
| hsa-miR-548d-3p | CAAAAACCACAGUUUCUUUUGC | 727 | GTGGTTTTT | 1664 | TGGTTTTT | 2601 | GGTTTTT | 3538 |
| hsa-miR-548d-5p | AAAAGUAAUUGUGGUUUUUGCC | 728 | AATTACTTT | 1665 | ATTACTTT | 2602 | TTACTTT | 3539 |
| hsa-miR-548e | AAAAACUGAGACUACUUUUGCA | 729 | CTCAGTTTT | 1666 | TCAGTTTT | 2603 | CAGTTTT | 3540 |
| hsa-miR-548f | AAAAACUGUAAUUACUUUU | 730 | TACAGTTTT | 1667 | ACAGTTTT | 2604 | CAGTTTT | 3541 |
| hsa-miR-548g | AAAACUGUAAUUACUUUUGUAC | 731 | TTACAGTTT | 1668 | TACAGTTT | 2605 | ACAGTTT | 3542 |
| hsa-miR-548h | AAAAGUAAUCGCGGUUUUUGUC | 732 | GATTACTTT | 1669 | ATTACTTT | 2606 | TTACTTT | 3543 |
| hsa-miR-548i | AAAAGUAAUUGCGGAUUUUGCC | 733 | AATTACTTT | 1670 | ATTACTTT | 2607 | TTACTTT | 3544 |
| hsa-miR-548j | AAAAGUAAUUGCGGUCUUUGGU | 734 | AATTACTTT | 1671 | ATTACTTT | 2608 | TTACTTT | 3545 |
| hsa-miR-548k | AAAAGUACUUGCGGAUUUUGCU | 735 | AAGTACTTT | 1672 | AGTACTTT | 2609 | GTACTTT | 3546 |
| hsa-miR-548l | AAAAGUAUUUGCGGGUUUUGUC | 736 | AAATACTTT | 1673 | AATACTTT | 2610 | ATACTTT | 3547 |
| hsa-miR-548m | CAAAGGUAUUUGUGGUUUUUG | 737 | AATACCTTT | 1674 | ATACCTTT | 2611 | TACCTTT | 3548 |
| hsa-miR-548n | CAAAAGUAAUUGUGGAUUUUGU | 738 | ATTACTTTT | 1675 | TTACTTTT | 2612 | TACTTTT | 3549 |
| hsa-miR-548o | CCAAAACUGCAGUUACUUUUGC | 739 | GCAGTTTTG | 1676 | CAGTTTTG | 2613 | AGTTTTG | 3550 |
| hsa-miR-548p | UAGCAAAAACUGCAGUUACUUU | 740 | GTTTTTGCT | 1677 | TTTTTGCT | 2614 | TTTTGCT | 3551 |
| hsa-miR-549 | UGACAACUAUGGAUGAGCUCU | 741 | ATAGTTGTC | 1678 | TAGTTGTC | 2615 | AGTTGTC | 3552 |
| hsa-miR-550 | AGUGCCUGAGGGAGUAAGAGCCC | 742 | CTCAGGCAC | 1679 | TCAGGCAC | 2616 | CAGGCAC | 3553 |
| hsa-miR-550* | UGUCUUACUCCCUCAGGCACAU | 743 | GAGTAAGAC | 1680 | AGTAAGAC | 2617 | GTAAGAC | 3554 |
| hsa-miR-551a | GCGACCCACUCUUGGUUUCCA | 744 | AGTGGGTCG | 1681 | GTGGGTCG | 2618 | TGGGTCG | 3555 |
| hsa-miR-551b | GCGACCCAUACUUGGUUUCAG | 745 | TATGGGTCG | 1682 | ATGGGTCG | 2619 | TGGGTCG | 3556 |
| hsa-miR-551b* | GAAAUCAAGCGUGGGUGAGACC | 746 | GCTTGATTT | 1683 | CTTGATTT | 2620 | TTGATTT | 3557 |
| hsa-miR-552 | AACAGGUGACUGGUUAGACAA | 747 | GTCACCTGT | 1684 | TCACCTGT | 2621 | CACCTGT | 3558 |
| hsa-miR-553 | AAAACGGUGAGAUUUUGUUUU | 748 | TCACCGTTT | 1685 | CACCGTTT | 2622 | ACCGTTT | 3559 |
| hsa-miR-554 | GCUAGUCCUGACUCAGCCAGU | 749 | CAGGACTAG | 1686 | AGGACTAG | 2623 | GGACTAG | 3560 |
| hsa-miR-555 | AGGGUAAGCUGAACCUCUGAU | 750 | AGCTTACCC | 1687 | GCTTACCC | 2624 | CTTACCC | 3561 |
| hsa-miR-556-3p | AUAUUACCAUUAGCUCAUCUUU | 751 | ATGGTAATA | 1688 | TGGTAATA | 2625 | GGTAATA | 3562 |
| hsa-miR-556-5p | GAUGAGCUCAUUGUAAUAUGAG | 752 | TGAGCTCAT | 1689 | GAGCTCAT | 2626 | AGCTCAT | 3563 |
| hsa-miR-557 | GUUUGCACGGGUGGGCCUUGUCU | 753 | CCGTGCAAA | 1690 | CGTGCAAA | 2627 | GTGCAAA | 3564 |
| hsa-miR-558 | UGAGCUGCUGUACCAAAAU | 754 | CAGCAGCTC | 1691 | AGCAGCTC | 2628 | GCAGCTC | 3565 |
| hsa-miR-559 | UAAAGUAAAUAUGCACCAAAA | 755 | ATTTACTTT | 1692 | TTTACTTT | 2629 | TTACTTT | 3566 |
| hsa-miR-561 | CAAAGUUUAAGAUCCUUGAAGU | 756 | TTAAACTTT | 1693 | TAAACTTT | 2630 | AAACTTT | 3567 |
| hsa-miR-562 | AAAGUAGCUGUACCAUUUGC | 757 | CAGCTACTT | 1694 | AGCTACTT | 2631 | GCTACTT | 3568 |
| hsa-miR-563 | AGGUUGACAUACGUUUCCC | 758 | ATGTCAACC | 1695 | TGTCAACC | 2632 | GTCAACC | 3569 |
| hsa-miR-564 | AGGCACGGUGUCAGCAGGC | 759 | CACCGTGCC | 1696 | ACCGTGCC | 2633 | CCGTGCC | 3570 |
| hsa-miR-566 | GGGCGCCUGUGAUCCCAAC | 760 | ACAGGCGCC | 1697 | CAGGCGCC | 2634 | AGGCGCC | 3571 |
| hsa-miR-567 | AGUAUGUUCUUCCAGGACAGAAC | 761 | AGAACATAC | 1698 | GAACATAC | 2635 | AACATAC | 3572 |
| hsa-miR-568 | AUGUAUAAAUGUAUACACAC | 762 | ATTTATACA | 1699 | TTTATACA | 2636 | TTATACA | 3573 |
| hsa-miR-569 | AGUUAAUGAAUCCUGGAAAGU | 763 | TTCATTAAC | 1700 | TCATTAAC | 2637 | CATTAAC | 3574 |
| hsa-miR-570 | CGAAAACAGCAAUUACCUUUGC | 764 | GCTGTTTTC | 1701 | CTGTTTTC | 2638 | TGTTTTC | 3575 |
| hsa-miR-571 | UGAGUUGGCCAUCUGAGUGAG | 765 | GGCCAACTC | 1702 | GCCAACTC | 2639 | CCAACTC | 3576 |
| hsa-miR-572 | GUCCGCUCGGCGGUGGCCCA | 766 | CCGAGCGGA | 1703 | CGAGCGGA | 2640 | GAGCGGA | 3577 |
| hsa-miR-573 | CUGAAGUGAUGUGUAACUGAUCAG | 767 | ATCACTTCA | 1704 | TCACTTCA | 2641 | CACTTCA | 3578 |
| hsa-miR-574-3p | CACGCUCAUGCACACACCCACA | 768 | CATGAGCGT | 1705 | ATGAGCGT | 2642 | TGAGCGT | 3579 |
| hsa-miR-574-5p | UGAGUGUGUGUGUGUGAGUGUGU | 769 | CACACACTC | 1706 | ACACACTC | 2643 | CACACTC | 3580 |
| hsa-miR-575 | GAGCCAGUUGGACAGGAGC | 770 | CAACTGGCT | 1707 | AACTGGCT | 2644 | ACTGGCT | 3581 |
| hsa-miR-576-3p | AAGAUGUGGAAAAAUUGGAAUC | 771 | TCCACATCT | 1708 | CCACATCT | 2645 | CACATCT | 3582 |
| hsa-miR-576-5p | AUUCUAAUUUCUCCACGUCUUU | 772 | AAATTAGAA | 1709 | AATTAGAA | 2646 | ATTAGAA | 3583 |
| hsa-miR-577 | UAGAUAAAAUAUUGGUACCUG | 773 | ATTTTATCT | 1710 | TTTTATCT | 2647 | TTTATCT | 3584 |
| hsa-miR-578 | CUUCUUGUGCUCUAGGAUUGU | 774 | GCACAAGAA | 1711 | CACAAGAA | 2648 | ACAAGAA | 3585 |
| hsa-miR-579 | UUCAUUUGGUAUAAACCGCGAUU | 775 | ACCAAATGA | 1712 | CCAAATGA | 2649 | CAAATGA | 3586 |
| hsa-miR-580 | UUGAGAAUGAUGAAUCAUUAGG | 776 | TCATTCTCA | 1713 | CATTCTCA | 2650 | ATTCTCA | 3587 |
| hsa-miR-581 | UCUUGUGUUCUCUAGAUCAGU | 777 | GAACACAAG | 1714 | AACACAAG | 2651 | ACACAAG | 3588 |
| hsa-miR-582-3p | UAACUGGUUGAACAACUGAACC | 778 | CAACCAGTT | 1715 | AACCAGTT | 2652 | ACCAGTT | 3589 |
| hsa-miR-582-5p | UUACAGUUGUUCAACCAGUUACU | 779 | ACAACTGTA | 1716 | CAACTGTA | 2653 | AACTGTA | 3590 |
| hsa-miR-583 | CAAAGAGGAAGGUCCCAUUAC | 780 | TTCCTCTTT | 1717 | TCCTCTTT | 2654 | CCTCTTT | 3591 |
| hsa-miR-584 | UUAUGGUUUGCCUGGGACUGAG | 781 | CAAACCATA | 1718 | AAACCATA | 2655 | AACCATA | 3592 |
| hsa-miR-585 | UGGGCGUAUCUGUAUGCUA | 782 | GATACGCCC | 1719 | ATACGCCC | 2656 | TACGCCC | 3593 |
| hsa-miR-586 | UAUGCAUUGUAUUUUUAGGUCC | 783 | ACAATGCAT | 1720 | CAATGCAT | 2657 | AATGCAT | 3594 |
| hsa-miR-587 | UUUCCAUAGGUGAUGAGUCAC | 784 | CCTATGGAA | 1721 | CTATGGAA | 2658 | TATGGAA | 3595 |
| hsa-miR-588 | UUGGCCACAAUGGGUUAGAAC | 785 | TTGTGGCCA | 1722 | TGTGGCCA | 2659 | GTGGCCA | 3596 |
| hsa-miR-589 | UGAGAACCACGUCUGCUCUGAG | 786 | GTGGTTCTC | 1723 | TGGTTCTC | 2660 | GGTTCTC | 3597 |
| hsa-miR-589* | UCAGAACAAAUGCCGGUUCCCAGA | 787 | TTTGTTCTG | 1724 | TTGTTCTG | 2661 | TGTTCTG | 3598 |
| hsa-miR-590-3p | UAAUUUUAUGUAUAAGCUAGU | 788 | CATAAAATT | 1725 | ATAAAATT | 2662 | TAAAATT | 3599 |
| hsa-miR-590-5p | GAGCUUAUUCAUAAAAGUGCAG | 789 | GAATAAGCT | 1726 | AATAAGCT | 2663 | ATAAGCT | 3600 |
| hsa-miR-591 | AGACCAUGGGUUCUCAUUGU | 790 | CCCATGGTC | 1727 | CCATGGTC | 2664 | CATGGTC | 3601 |
| hsa-miR-592 | UUGUGUCAAUAUGCGAUGAUGU | 791 | ATTGACACA | 1728 | TTGACACA | 2665 | TGACACA | 3602 |
| hsa-miR-593 | UGUCUCUGCUGGGGUUUCU | 792 | AGCAGAGAC | 1729 | GCAGAGAC | 2666 | CAGAGAC | 3603 |
| hsa-miR-593* | AGGCACCAGCCAGGCAUUGCUCAGC | 793 | GCTGGTGCC | 1730 | CTGGTGCC | 2667 | TGGTGCC | 3604 |
| hsa-miR-595 | GAAGUGUGCCGUGGUGUGUCU | 794 | GGCACACTT | 1731 | GCACACTT | 2668 | CACACTT | 3605 |
| hsa-miR-596 | AAGCCUGCCCGGCUCCUCGGG | 795 | GGGCAGGCT | 1732 | GGCAGGCT | 2669 | GCAGGCT | 3606 |
| hsa-miR-597 | UGUGUCACUCGAUGACCACUGU | 796 | GAGTGACAC | 1733 | AGTGACAC | 2670 | GTGACAC | 3607 |
| hsa-miR-598 | UACGUCAUCGUUGUCAUCGUCA | 797 | CGATGACGT | 1734 | GATGACGT | 2671 | ATGACGT | 3608 |
| hsa-miR-599 | GUUGUGUCAGUUUAUCAAAC | 798 | CTGACACAA | 1735 | TGACACAA | 2672 | GACACAA | 3609 |
| hsa-miR-600 | ACUUACAGACAAGAGCCUUGCUC | 799 | GTCTGTAAG | 1736 | TCTGTAAG | 2673 | CTGTAAG | 3610 |
| hsa-miR-601 | UGGUCUAGGAUUGUUGGAGGAG | 800 | TCCTAGACC | 1737 | CCTAGACC | 2674 | CTAGACC | 3611 |
| hsa-miR-602 | GACACGGGCGACAGCUGCGGCCC | 801 | CGCCCGTGT | 1738 | GCCCGTGT | 2675 | CCCGTGT | 3612 |
| hsa-miR-603 | CACACACUGCAAUUACUUUUGC | 802 | GCAGTGTGT | 1739 | CAGTGTGT | 2676 | AGTGTGT | 3613 |
| hsa-miR-604 | AGGCUGCGGAAUUCAGGAC | 803 | TCCGCAGCC | 1740 | CCGCAGCC | 2677 | CGCAGCC | 3614 |
| hsa-miR-605 | UAAAUCCCAUGGUGCCUUCUCCU | 804 | ATGGGATTT | 1741 | TGGGATTT | 2678 | GGGATTT | 3615 |
| hsa-miR-606 | AAACUACUGAAAAUCAAAGAU | 805 | TCAGTAGTT | 1742 | CAGTAGTT | 2679 | AGTAGTT | 3616 |
| hsa-miR-607 | GUUCAAAUCCAGAUCUAUAAC | 806 | GGATTTGAA | 1743 | GATTTGAA | 2680 | ATTTGAA | 3617 |
| hsa-miR-608 | AGGGGUGGUGUUGGGACAGCUCCGU | 807 | CACCACCCC | 1744 | ACCACCCC | 2681 | CCACCCC | 3618 |
| hsa-miR-609 | AGGGUGUUUCUCUCAUCUCU | 808 | GAAACACCC | 1745 | AAACACCC | 2682 | AACACCC | 3619 |
| hsa-miR-610 | UGAGCUAAAUGUGUGCUGGGA | 809 | ATTTAGCTC | 1746 | TTTAGCTC | 2683 | TTAGCTC | 3620 |
| hsa-miR-611 | GCGAGGACCCCUCGGGGUCUGAC | 810 | GGGTCCTCG | 1747 | GGTCCTCG | 2684 | GTCCTCG | 3621 |
| hsa-miR-612 | GCUGGGCAGGGCUUCUGAGCUCCUU | 811 | CCTGCCCAG | 1748 | CTGCCCAG | 2685 | TGCCCAG | 3622 |
| hsa-miR-613 | AGGAAUGUUCCUUCUUUGCC | 812 | GAACATTCC | 1749 | AACATTCC | 2686 | ACATTCC | 3623 |
| hsa-miR-614 | GAACGCCUGUUCUUGCCAGGUGG | 813 | ACAGGCGTT | 1750 | CAGGCGTT | 2687 | AGGCGTT | 3624 |
| hsa-miR-615-3p | UCCGAGCCUGGGUCUCCCUCUU | 814 | CAGGCTCGG | 1751 | AGGCTCGG | 2688 | GGCTCGG | 3625 |
| hsa-miR-615-5p | GGGGGUCCCCGGUGCUCGGAUC | 815 | GGGGACCCC | 1752 | GGGACCCC | 2689 | GGACCCC | 3626 |
| hsa-miR-616 | AGUCAUUGGAGGGUUUGAGCAG | 816 | TCCAATGAC | 1753 | CCAATGAC | 2690 | CAATGAC | 3627 |
| hsa-miR-616* | ACUCAAAACCCUUCAGUGACUU | 817 | GGTTTTGAG | 1754 | GTTTTGAG | 2691 | TTTTGAG | 3628 |
| hsa-miR-617 | AGACUUCCCAUUUGAAGGUGGC | 818 | TGGGAAGTC | 1755 | GGGAAGTC | 2692 | GGAAGTC | 3629 |
| hsa-miR-618 | AAACUCUACUUGUCCUUCUGAGU | 819 | AGTAGAGTT | 1756 | GTAGAGTT | 2693 | TAGAGTT | 3630 |
| hsa-miR-619 | GACCUGGACAUGUUUGUGCCCAGU | 820 | TGTCCAGGT | 1757 | GTCCAGGT | 2694 | TCCAGGT | 3631 |
| hsa-miR-620 | AUGGAGAUAGAUAUAGAAAU | 821 | CTATCTCCA | 1758 | TATCTCCA | 2695 | ATCTCCA | 3632 |
| hsa-miR-621 | GGCUAGCAACAGCGCUUACCU | 822 | GTTGCTAGC | 1759 | TTGCTAGC | 2696 | TGCTAGC | 3633 |
| hsa-miR-622 | ACAGUCUGCUGAGGUUGGAGC | 823 | AGCAGACTG | 1760 | GCAGACTG | 2697 | CAGACTG | 3634 |
| hsa-miR-623 | AUCCCUUGCAGGGGCUGUUGGGU | 824 | TGCAAGGGA | 1761 | GCAAGGGA | 2698 | CAAGGGA | 3635 |
| hsa-miR-624 | CACAAGGUAUUGGUAUUACCU | 825 | ATACCTTGT | 1762 | TACCTTGT | 2699 | ACCTTGT | 3636 |
| hsa-miR-624* | UAGUACCAGUACCUUGUGUUCA | 826 | ACTGGTACT | 1763 | CTGGTACT | 2700 | TGGTACT | 3637 |
| hsa-miR-625 | AGGGGGAAAGUUCUAUAGUCC | 827 | CTTTCCCCC | 1764 | TTTCCCCC | 2701 | TTCCCCC | 3638 |
| hsa-miR-625* | GACUAUAGAACUUUCCCCCUCA | 828 | TTCTATAGT | 1765 | TCTATAGT | 2702 | CTATAGT | 3639 |
| hsa-miR-626 | AGCUGUCUGAAAAUGUCUU | 829 | TCAGACAGC | 1766 | CAGACAGC | 2703 | AGACAGC | 3640 |
| hsa-miR-627 | GUGAGUCUCUAAGAAAAGAGGA | 830 | AGAGACTCA | 1767 | GAGACTCA | 2704 | AGACTCA | 3641 |
| hsa-miR-628-3p | UCUAGUAAGAGUGGCAGUCGA | 831 | TCTTACTAG | 1768 | CTTACTAG | 2705 | TTACTAG | 3642 |
| hsa-miR-628-5p | AUGCUGACAUAUUUACUAGAGG | 832 | ATGTCAGCA | 1769 | TGTCAGCA | 2706 | GTCAGCA | 3643 |
| hsa-miR-629 | UGGGUUUACGUUGGGAGAACU | 833 | CGTAAACCC | 1770 | GTAAACCC | 2707 | TAAACCC | 3644 |
| hsa-miR-629* | GUUCUCCCAACGUAAGCCCAGC | 834 | TTGGGAGAA | 1771 | TGGGAGAA | 2708 | GGGAGAA | 3645 |
| hsa-miR-630 | AGUAUUCUGUACCAGGGAAGGU | 835 | ACAGAATAC | 1772 | CAGAATAC | 2709 | AGAATAC | 3646 |
| hsa-miR-631 | AGACCUGGCCCAGACCUCAGC | 836 | GGCCAGGTC | 1773 | GCCAGGTC | 2710 | CCAGGTC | 3647 |
| hsa-miR-632 | GUGUCUGCUUCCUGUGGGA | 837 | AAGCAGACA | 1774 | AGCAGACA | 2711 | GCAGACA | 3648 |
| hsa-miR-633 | CUAAUAGUAUCUACCACAAUAAA | 838 | ATACTATTA | 1775 | TACTATTA | 2712 | ACTATTA | 3649 |
| hsa-miR-634 | AACCAGCACCCCAACUUUGGAC | 839 | GGTGCTGGT | 1776 | GTGCTGGT | 2713 | TGCTGGT | 3650 |
| hsa-miR-635 | ACUUGGGCACUGAAACAAUGUCC | 840 | GTGCCCAAG | 1777 | TGCCCAAG | 2714 | GCCCAAG | 3651 |
| hsa-miR-636 | UGUGCUUGCUCGUCCCGCCCGCA | 841 | AGCAAGCAC | 1778 | GCAAGCAC | 2715 | CAAGCAC | 3652 |
| hsa-miR-637 | ACUGGGGGCUUUCGGGCUCUGCGU | 842 | AGCCCCCAG | 1779 | GCCCCCAG | 2716 | CCCCCAG | 3653 |
| hsa-miR-638 | AGGGAUCGCGGGCGGGUGGCGGCCU | 843 | CGCGATCCC | 1780 | GCGATCCC | 2717 | CGATCCC | 3654 |
| hsa-miR-639 | AUCGCUGCGGUUGCGAGCGCUGU | 844 | CCGCAGCGA | 1781 | CGCAGCGA | 2718 | GCAGCGA | 3655 |
| hsa-miR-640 | AUGAUCCAGGAACCUGCCUCU | 845 | CCTGGATCA | 1782 | CTGGATCA | 2719 | TGGATCA | 3656 |
| hsa-miR-641 | AAAGACAUAGGAUAGAGUCACCUC | 846 | CTATGTCTT | 1783 | TATGTCTT | 2720 | ATGTCTT | 3657 |
| hsa-miR-642 | GUCCCUCUCCAAAUGUGUCUUG | 847 | GGAGAGGGA | 1784 | GAGAGGGA | 2721 | AGAGGGA | 3658 |
| hsa-miR-643 | ACUUGUAUGCUAGCUCAGGUAG | 848 | GCATACAAG | 1785 | CATACAAG | 2722 | ATACAAG | 3659 |
| hsa-miR-644 | AGUGUGGCUUUCUUAGAGC | 849 | AAGCCACAC | 1786 | AGCCACAC | 2723 | GCCACAC | 3660 |
| hsa-miR-645 | UCUAGGCUGGUACUGCUGA | 850 | CCAGCCTAG | 1787 | CAGCCTAG | 2724 | AGCCTAG | 3661 |
| hsa-miR-646 | AAGCAGCUGCCUCUGAGGC | 851 | GCAGCTGCT | 1788 | CAGCTGCT | 2725 | AGCTGCT | 3662 |
| hsa-miR-647 | GUGGCUGCACUCACUUCCUUC | 852 | GTGCAGCCA | 1789 | TGCAGCCA | 2726 | GCAGCCA | 3663 |
| hsa-miR-648 | AAGUGUGCAGGGCACUGGU | 853 | CTGCACACT | 1790 | TGCACACT | 2727 | GCACACT | 3664 |
| hsa-miR-649 | AAACCUGUGUUGUUCAAGAGUC | 854 | ACACAGGTT | 1791 | CACAGGTT | 2728 | ACAGGTT | 3665 |
| hsa-miR-650 | AGGAGGCAGCGCUCUCAGGAC | 855 | GCTGCCTCC | 1792 | CTGCCTCC | 2729 | TGCCTCC | 3666 |
| hsa-miR-651 | UUUAGGAUAAGCUUGACUUUUG | 856 | TTATCCTAA | 1793 | TATCCTAA | 2730 | ATCCTAA | 3667 |
| hsa-miR-652 | AAUGGCGCCACUAGGGUUGUG | 857 | TGGCGCCAT | 1794 | GGCGCCAT | 2731 | GCGCCAT | 3668 |
| hsa-miR-653 | GUGUUGAAACAAUCUCUACUG | 858 | GTTTCAACA | 1795 | TTTCAACA | 2732 | TTCAACA | 3669 |
| hsa-miR-654-3p | UAUGUCUGCUGACCAUCACCUU | 859 | AGCAGACAT | 1796 | GCAGACAT | 2733 | CAGACAT | 3670 |
| hsa-miR-654-5p | UGGUGGGCCGCAGAACAUGUGC | 860 | CGGCCCACC | 1797 | GGCCCACC | 2734 | GCCCACC | 3671 |
| hsa-miR-655 | AUAAUACAUGGUUAACCUCUUU | 861 | CATGTATTA | 1798 | ATGTATTA | 2735 | TGTATTA | 3672 |
| hsa-miR-656 | AAUAUUAUACAGUCAACCUCU | 862 | GTATAATAT | 1799 | TATAATAT | 2736 | ATAATAT | 3673 |
| hsa-miR-657 | GGCAGGUUCUCACCCUCUCUAGG | 863 | AGAACCTGC | 1800 | GAACCTGC | 2737 | AACCTGC | 3674 |
| hsa-miR-658 | GGCGGAGGGAAGUAGGUCCGUUGGU | 864 | TCCCTCCGC | 1801 | CCCTCCGC | 2738 | CCTCCGC | 3675 |
| hsa-miR-659 | CUUGGUUCAGGGAGGGUCCCCA | 865 | CTGAACCAA | 1802 | TGAACCAA | 2739 | GAACCAA | 3676 |
| hsa-miR-660 | UACCCAUUGCAUAUCGGAGUUG | 866 | GCAATGGGT | 1803 | CAATGGGT | 2740 | AATGGGT | 3677 |
| hsa-miR-661 | UGCCUGGGUCUCUGGCCUGCGCGU | 867 | GACCCAGGC | 1804 | ACCCAGGC | 2741 | CCCAGGC | 3678 |
| hsa-miR-662 | UCCCACGUUGUGGCCCAGCAG | 868 | CAACGTGGG | 1805 | AACGTGGG | 2742 | ACGTGGG | 3679 |
| hsa-miR-663 | AGGCGGGGCGCCGCGGGACCGC | 869 | CGCCCCGCC | 1806 | GCCCCGCC | 2743 | CCCCGCC | 3680 |
| hsa-miR-663b | GGUGGCCCGGCCGUGCCUGAGG | 870 | CCGGGCCAC | 1807 | CGGGCCAC | 2744 | GGGCCAC | 3681 |
| hsa-miR-664 | UAUUCAUUUAUCCCCAGCCUACA | 871 | TAAATGAAT | 1808 | AAATGAAT | 2745 | AATGAAT | 3682 |
| hsa-miR-664* | ACUGGCUAGGGAAAAUGAUUGGAU | 872 | CCTAGCCAG | 1809 | CTAGCCAG | 2746 | TAGCCAG | 3683 |
| hsa-miR-665 | ACCAGGAGGCUGAGGCCCCU | 873 | GCCTCCTGG | 1810 | CCTCCTGG | 2747 | CTCCTGG | 3684 |
| hsa-miR-668 | UGUCACUCGGCUCGGCCCACUAC | 874 | CCGAGTGAC | 1811 | CGAGTGAC | 2748 | GAGTGAC | 3685 |
| hsa-miR-671-3p | UCCGGUUCUCAGGGCUCCACC | 875 | GAGAACCGG | 1812 | AGAACCGG | 2749 | GAACCGG | 3686 |
| hsa-miR-671-5p | AGGAAGCCCUGGAGGGGCUGGAG | 876 | AGGGCTTCC | 1813 | GGGCTTCC | 2750 | GGCTTCC | 3687 |
| hsa-miR-675 | UGGUGCGGAGAGGGCCCACAGUG | 877 | CTCCGCACC | 1814 | TCCGCACC | 2751 | CCGCACC | 3688 |
| hsa-miR-675b | CUGUAUGCCCUCACCGCUCA | 878 | GGGCATACA | 1815 | GGCATACA | 2752 | GCATACA | 3689 |
| hsa-miR-7 | UGGAAGACUAGUGAUUUUGUUGU | 879 | TAGTCTTCC | 1816 | AGTCTTCC | 2753 | GTCTTCC | 3690 |
| hsa-miR-7-1* | CAACAAAUCACAGUCUGCCAUA | 880 | TGATTTGTT | 1817 | GATTTGTT | 2754 | ATTTGTT | 3691 |
| hsa-miR-7-2* | CAACAAAUCCCAGUCUACCUAA | 881 | GGATTTGTT | 1818 | GATTTGTT | 2755 | ATTTGTT | 3692 |
| hsa-miR-708 | AAGGAGCUUACAAUCUAGCUGGG | 882 | TAAGCTCCT | 1819 | AAGCTCCT | 2756 | AGCTCCT | 3693 |
| hsa-miR-708* | CAACUAGACUGUGAGCUUCUAG | 883 | AGTCTAGTT | 1820 | GTCTAGTT | 2757 | TCTAGTT | 3694 |
| hsa-miR-720 | UCUCGCUGGGGCCUCCA | 884 | CCCAGCGAG | 1821 | CCAGCGAG | 2758 | CAGCGAG | 3695 |
| hsa-miR-744 | UGCGGGGCUAGGGCUAACAGCA | 885 | TAGCCCCGC | 1822 | AGCCCCGC | 2759 | GCCCCGC | 3696 |
| hsa-miR-744* | CUGUUGCCACUAACCUCAACCU | 886 | GTGGCAACA | 1823 | TGGCAACA | 2760 | GGCAACA | 3697 |
| hsa-miR-758 | UUUGUGACCUGGUCCACUAACC | 887 | AGGTCACAA | 1824 | GGTCACAA | 2761 | GTCACAA | 3698 |
| hsa-miR-760 | CGGCUCUGGGUCUGUGGGGA | 888 | CCCAGAGCC | 1825 | CCAGAGCC | 2762 | CAGAGCC | 3699 |
| hsa-miR-765 | UGGAGGAGAAGGAAGGUGAUG | 889 | TTCTCCTCC | 1826 | TCTCCTCC | 2763 | CTCCTCC | 3700 |
| hsa-miR-766 | ACUCCAGCCCCACAGCCUCAGC | 890 | GGGCTGGAG | 1827 | GGCTGGAG | 2764 | GCTGGAG | 3701 |
| hsa-miR-767-3p | UCUGCUCAUACCCCAUGGUUUCU | 891 | TATGAGCAG | 1828 | ATGAGCAG | 2765 | TGAGCAG | 3702 |
| hsa-miR-767-5p | UGCACCAUGGUUGUCUGAGCAUG | 892 | CCATGGTGC | 1829 | CATGGTGC | 2766 | ATGGTGC | 3703 |
| hsa-miR-769-3p | CUGGGAUCUCCGGGGUCUUGGUU | 893 | GAGATCCCA | 1830 | AGATCCCA | 2767 | GATCCCA | 3704 |
| hsa-miR-769-5p | UGAGACCUCUGGGUUCUGAGCU | 894 | AGAGGTCTC | 1831 | GAGGTCTC | 2768 | AGGTCTC | 3705 |
| hsa-miR-770-5p | UCCAGUACCACGUGUCAGGGCCA | 895 | TGGTACTGG | 1832 | GGTACTGG | 2769 | GTACTGG | 3706 |
| hsa-miR-802 | CAGUAACAAAGAUUCAUCCUUGU | 896 | TTTGTTACT | 1833 | TTGTTACT | 2770 | TGTTACT | 3707 |
| hsa-miR-873 | GCAGGAACUUGUGAGUCUCCU | 897 | AAGTTCCTG | 1834 | AGTTCCTG | 2771 | GTTCCTG | 3708 |
| hsa-miR-874 | CUGCCCUGGCCCGAGGGACCGA | 898 | GCCAGGGCA | 1835 | CCAGGGCA | 2772 | CAGGGCA | 3709 |
| hsa-miR-875-3p | CCUGGAAACACUGAGGUUGUG | 899 | TGTTTCCAG | 1836 | GTTTCCAG | 2773 | TTTCCAG | 3710 |
| hsa-miR-875-5p | UAUACCUCAGUUUUAUCAGGUG | 900 | CTGAGGTAT | 1837 | TGAGGTAT | 2774 | GAGGTAT | 3711 |
| hsa-miR-876-3p | UGGUGGUUUACAAAGUAAUUCA | 901 | TAAACCACC | 1838 | AAACCACC | 2775 | AACCACC | 3712 |
| hsa-miR-876-5p | UGGAUUUCUUUGUGAAUCACCA | 902 | AAGAAATCC | 1839 | AGAAATCC | 2776 | GAAATCC | 3713 |
| hsa-miR-877 | GUAGAGGAGAUGGCGCAGGG | 903 | TCTCCTCTA | 1840 | CTCCTCTA | 2777 | TCCTCTA | 3714 |
| hsa-miR-877* | UCCUCUUCUCCCUCCUCCCAG | 904 | GAGAAGAGG | 1841 | AGAAGAGG | 2778 | GAAGAGG | 3715 |
| hsa-miR-885-3p | AGGCAGCGGGGUGUAGUGGAUA | 905 | CCCGCTGCC | 1842 | CCGCTGCC | 2779 | CGCTGCC | 3716 |
| hsa-miR-885-5p | UCCAUUACACUACCCUGCCUCU | 906 | GTGTAATGG | 1843 | TGTAATGG | 2780 | GTAATGG | 3717 |
| hsa-miR-886-3p | CGCGGGUGCUUACUGACCCUU | 907 | AGCACCCGC | 1844 | GCACCCGC | 2781 | CACCCGC | 3718 |
| hsa-miR-886-5p | CGGGUCGGAGUUAGCUCAAGCGG | 908 | CTCCGACCC | 1845 | TCCGACCC | 2782 | CCGACCC | 3719 |
| hsa-miR-887 | GUGAACGGGCGCCAUCCCGAGG | 909 | GCCCGTTCA | 1846 | CCCGTTCA | 2783 | CCGTTCA | 3720 |
| hsa-miR-888 | UACUCAAAAAGCUGUCAGUCA | 910 | TTTTTGAGT | 1847 | TTTTGAGT | 2784 | TTTGAGT | 3721 |
| hsa-miR-888* | GACUGACACCUCUUUGGGUGAA | 911 | GGTGTCAGT | 1848 | GTGTCAGT | 2785 | TGTCAGT | 3722 |
| hsa-miR-889 | UUAAUAUCGGACAACCAUUGU | 912 | CCGATATTA | 1849 | CGATATTA | 2786 | GATATTA | 3723 |
| hsa-miR-890 | UACUUGGAAAGGCAUCAGUUG | 913 | TTTCCAAGT | 1850 | TTCCAAGT | 2787 | TCCAAGT | 3724 |
| hsa-miR-891a | UGCAACGAACCUGAGCCACUGA | 914 | GTTCGTTGC | 1851 | TTCGTTGC | 2788 | TCGTTGC | 3725 |
| hsa-miR-891b | UGCAACUUACCUGAGUCAUUGA | 915 | GTAAGTTGC | 1852 | TAAGTTGC | 2789 | AAGTTGC | 3726 |
| hsa-miR-892a | CACUGUGUCCUUUCUGCGUAG | 916 | GGACACAGT | 1853 | GACACAGT | 2790 | ACACAGT | 3727 |
| hsa-miR-892b | CACUGGCUCCUUUCUGGGUAGA | 917 | GGAGCCAGT | 1854 | GAGCCAGT | 2791 | AGCCAGT | 3728 |
| hsa-miR-9 | UCUUUGGUUAUCUAGCUGUAUGA | 918 | TAACCAAAG | 1855 | AACCAAAG | 2792 | ACCAAAG | 3729 |
| hsa-miR-9* | AUAAAGCUAGAUAACCGAAAGU | 919 | CTAGCTTTA | 1856 | TAGCTTTA | 2793 | AGCTTTA | 3730 |
| hsa-miR-920 | GGGGAGCUGUGGAAGCAGUA | 920 | ACAGCTCCC | 1857 | CAGCTCCC | 2794 | AGCTCCC | 3731 |
| hsa-miR-921 | CUAGUGAGGGACAGAACCAGGAUUC | 921 | CCCTCACTA | 1858 | CCTCACTA | 2795 | CTCACTA | 3732 |
| hsa-miR-922 | GCAGCAGAGAAUAGGACUACGUC | 922 | TCTCTGCTG | 1859 | CTCTGCTG | 2796 | TCTGCTG | 3733 |
| hsa-miR-923 | GUCAGCGGAGGAAAAGAAACU | 923 | CTCCGCTGA | 1860 | TCCGCTGA | 2797 | CCGCTGA | 3734 |
| hsa-miR-924 | AGAGUCUUGUGAUGUCUUGC | 924 | ACAAGACTC | 1861 | CAAGACTC | 2798 | AAGACTC | 3735 |
| hsa-miR-92a | UAUUGCACUUGUCCCGGCCUGU | 925 | AAGTGCAAT | 1862 | AGTGCAAT | 2799 | GTGCAAT | 3736 |
| hsa-miR-92a-1* | AGGUUGGGAUCGGUUGCAAUGCU | 926 | ATCCCAACC | 1863 | TCCCAACC | 2800 | CCCAACC | 3737 |
| hsa-miR-92a-2* | GGGUGGGGAUUUGUUGCAUUAC | 927 | ATCCCCACC | 1864 | TCCCCACC | 2801 | CCCCACC | 3738 |
| hsa-miR-92b | UAUUGCACUCGUCCCGGCCUCC | 928 | GAGTGCAAT | 1865 | AGTGCAAT | 2802 | GTGCAAT | 3739 |
| hsa-miR-92b* | AGGGACGGGACGCGGUGCAGUG | 929 | TCCCGTCCC | 1866 | CCCGTCCC | 2803 | CCGTCCC | 3740 |
| hsa-miR-93 | CAAAGUGCUGUUCGUGCAGGUAG | 930 | CAGCACTTT | 1867 | AGCACTTT | 2804 | GCACTTT | 3741 |
| hsa-miR-93* | ACUGCUGAGCUAGCACUUCCCG | 931 | GCTCAGCAG | 1868 | CTCAGCAG | 2805 | TCAGCAG | 3742 |
| hsa-miR-933 | UGUGCGCAGGGAGACCUCUCCC | 932 | CCTGCGCAC | 1869 | CTGCGCAC | 2806 | TGCGCAC | 3743 |
| hsa-miR-934 | UGUCUACUACUGGAGACACUGG | 933 | GTAGTAGAC | 1870 | TAGTAGAC | 2807 | AGTAGAC | 3744 |
| hsa-miR-935 | CCAGUUACCGCUUCCGCUACCGC | 934 | CGGTAACTG | 1871 | GGTAACTG | 2808 | GTAACTG | 3745 |
| hsa-miR-936 | ACAGUAGAGGGAGGAAUCGCAG | 935 | CCTCTACTG | 1872 | CTCTACTG | 2809 | TCTACTG | 3746 |
| hsa-miR-937 | AUCCGCGCUCUGACUCUCUGCC | 936 | GAGCGCGGA | 1873 | AGCGCGGA | 2810 | GCGCGGA | 3747 |
| hsa-miR-938 | UGCCCUUAAAGGUGAACCCAGU | 937 | TTTAAGGGC | 1874 | TTAAGGGC | 2811 | TAAGGGC | 3748 |
| hsa-miR-939 | UGGGGAGCUGAGGCUCUGGGGGUG | 938 | CAGCTCCCC | 1875 | AGCTCCCC | 2812 | GCTCCCC | 3749 |
| hsa-miR-940 | AAGGCAGGGCCCCCGCUCCCC | 939 | GCCCTGCCT | 1876 | CCCTGCCT | 2813 | CCTGCCT | 3750 |
| hsa-miR-941 | CACCCGGCUGUGUGCACAUGUGC | 940 | CAGCCGGGT | 1877 | AGCCGGGT | 2814 | GCCGGGT | 3751 |
| hsa-miR-942 | UCUUCUCUGUUUUGGCCAUGUG | 941 | ACAGAGAAG | 1878 | CAGAGAAG | 2815 | AGAGAAG | 3752 |
| hsa-miR-943 | CUGACUGUUGCCGUCCUCCAG | 942 | CAACAGTCA | 1879 | AACAGTCA | 2816 | ACAGTCA | 3753 |
| hsa-miR-944 | AAAUUAUUGUACAUCGGAUGAG | 943 | ACAATAATT | 1880 | CAATAATT | 2817 | AATAATT | 3754 |
| hsa-miR-95 | UUCAACGGGUAUUUAUUGAGCA | 944 | ACCCGTTGA | 1881 | CCCGTTGA | 2818 | CCGTTGA | 3755 |
| hsa-miR-96 | UUUGGCACUAGCACAUUUUUGCU | 945 | TAGTGCCAA | 1882 | AGTGCCAA | 2819 | GTGCCAA | 3756 |
| hsa-miR-96* | AAUCAUGUGCAGUGCCAAUAUG | 946 | GCACATGAT | 1883 | CACATGAT | 2820 | ACATGAT | 3757 |
| hsa-miR-98 | UGAGGUAGUAAGUUGUAUUGUU | 947 | TACTACCTC | 1884 | ACTACCTC | 2821 | CTACCTC | 3758 |
| hsa-miR-99a | AACCCGUAGAUCCGAUCUUGUG | 948 | TCTACGGGT | 1885 | CTACGGGT | 2822 | TACGGGT | 3759 |
| hsa-miR-99a* | CAAGCUCGCUUCUAUGGGUCUG | 949 | AGCGAGCTT | 1886 | GCGAGCTT | 2823 | CGAGCTT | 3760 |
| hsa-miR-99b | CACCCGUAGAACCGACCUUGCG | 950 | TCTACGGGT | 1887 | CTACGGGT | 2824 | TACGGGT | 3761 |
| hsa-miR-99b* | CAAGCUCGUGUCUGUGGGUCCG | 951 | CACGAGCTT | 1888 | ACGAGCTT | 2825 | CGAGCTT | 3762 |
| hsv1-miR-H1 | UGGAAGGACGGGAAGUGGAAG | 952 | CGTCCTTCC | 1889 | GTCCTTCC | 2826 | TCCTTCC | 3763 |
| hsv1-miR-H2-3p | CCUGAGCCAGGGACGAGUGCGACU | 953 | CTGGCTCAG | 1890 | TGGCTCAG | 2827 | GGCTCAG | 3764 |
| hsv1-miR-H2-5p | UCGCACGCGCCCGGCACAGACU | 954 | GCGCGTGCG | 1891 | CGCGTGCG | 2828 | GCGTGCG | 3765 |
| hsv1-miR-H3 | CUGGGACUGUGCGGUUGGGA | 955 | ACAGTCCCA | 1892 | CAGTCCCA | 2829 | AGTCCCA | 3766 |
| hsv1-miR-H4-3p | CUUGCCUGUCUAACUCGCUAGU | 956 | GACAGGCAA | 1893 | ACAGGCAA | 2830 | CAGGCAA | 3767 |
| hsv1-miR-H4-5p | GGUAGAGUUUGACAGGCAAGCA | 957 | AAACTCTAC | 1894 | AACTCTAC | 2831 | ACTCTAC | 3768 |
| hsv1-miR-H5 | GUCAGAGAUCCAAACCCUCCGG | 958 | GATCTCTGA | 1895 | ATCTCTGA | 2832 | TCTCTGA | 3769 |
| hsv1-miR-H6 | CACUUCCCGUCCUUCCAUCCC | 959 | ACGGGAAGT | 1896 | CGGGAAGT | 2833 | GGGAAGT | 3770 |
| kshv-miR-K12-1 | AUUACAGGAAACUGGGUGUAAGC | 960 | TTCCTGTAA | 1897 | TCCTGTAA | 2834 | CCTGTAA | 3771 |
| kshv-miR-K12-10a | UAGUGUUGUCCCCCCGAGUGGC | 961 | GACAACACT | 1898 | ACAACACT | 2835 | CAACACT | 3772 |
| kshv-miR-K12-10b | UGGUGUUGUCCCCCCGAGUGGC | 962 | GACAACACC | 1899 | ACAACACC | 2836 | CAACACC | 3773 |
| kshv-miR-K12-11 | UUAAUGCUUAGCCUGUGUCCGA | 963 | TAAGCATTA | 1900 | AAGCATTA | 2837 | AGCATTA | 3774 |
| kshv-miR-K12-12 | ACCAGGCCACCAUUCCUCUCCG | 964 | GTGGCCTGG | 1901 | TGGCCTGG | 2838 | GGCCTGG | 3775 |
| kshv-miR-K12-2 | AACUGUAGUCCGGGUCGAUCUG | 965 | GACTACAGT | 1902 | ACTACAGT | 2839 | CTACAGT | 3776 |
| kshv-miR-K12-3 | UCACAUUCUGAGGACGGCAGCGA | 966 | CAGAATGTG | 1903 | AGAATGTG | 2840 | GAATGTG | 3777 |
| kshv-miR-K12-3* | UCGCGGUCACAGAAUGUGACA | 967 | GTGACCGCG | 1904 | TGACCGCG | 2841 | GACCGCG | 3778 |
| kshv-miR-K12-4-3p | UAGAAUACUGAGGCCUAGCUGA | 968 | CAGTATTCT | 1905 | AGTATTCT | 2842 | GTATTCT | 3779 |
| kshv-miR-K12-4-5p | AGCUAAACCGCAGUACUCUAGG | 969 | CGGTTTAGC | 1906 | GGTTTAGC | 2843 | GTTTAGC | 3780 |
| kshv-miR-K12-5 | UAGGAUGCCUGGAACUUGCCGG | 970 | AGGCATCCT | 1907 | GGCATCCT | 2844 | GCATCCT | 3781 |
| kshv-miR-K12-6-3p | UGAUGGUUUUCGGGCUGUUGAG | 971 | AAAACCATC | 1908 | AAACCATC | 2845 | AACCATC | 3782 |
| kshv-miR-K12-6-5p | CCAGCAGCACCUAAUCCAUCGG | 972 | GTGCTGCTG | 1909 | TGCTGCTG | 2846 | GCTGCTG | 3783 |
| kshv-miR-K12-7 | UGAUCCCAUGUUGCUGGCGCU | 973 | CATGGGATC | 1910 | ATGGGATC | 2847 | TGGGATC | 3784 |
| kshv-miR-K12-8 | UAGGCGCGACUGAGAGAGCACG | 974 | GTCGCGCCT | 1911 | TCGCGCCT | 2848 | CGCGCCT | 3785 |
| kshv-miR-K12-9 | CUGGGUAUACGCAGCUGCGUAA | 975 | GTATACCCA | 1912 | TATACCCA | 2849 | ATACCCA | 3786 |
| kshv-miR-K12-9* | ACCCAGCUGCGUAAACCCCGCU | 976 | GCAGCTGGG | 1913 | CAGCTGGG | 2850 | AGCTGGG | 3787 |

1. An oligomer of a contiguous sequence of 7, 8, 9 or 10 nucleotide units in length, for use in reducing the effective amount of a microRNA target in a cell or an organism, wherein at least 70% of the nucleotide units of the oligomer are selected from the group consisting of LNA units and 2′ substituted nucleotide analogues, and wherein at least 50% of the nucleotide units of the oligomer are LNA units, and wherein at least one of the internucleoside linkages present between the nucleotide units of the contiguous nucleotide sequence is a phosphorothioate internucleoside linkage.

2. The oligomer according to claim 1, wherein all the internucleoside linkages present between the nucleotide units of the contiguous nucleotide sequence are phosphorothioate internucleoside linkages.

3. The oligomer according to claim 2, wherein the length of the oligomer is 7, 8 or 9 contiguous nucleotides, wherein the contiguous nucleotide units are independently selected from the group consisting of LNA units and 2′ substituted nucleotide analogues.

4. The oligomer according to any one of claims 1-3, wherein at least 70% of the nucleotide units of the oligomer are LNA units.

5. The oligomer according to any one of claims 1-3, wherein all the nucleotide units of the oligomer are LNA units.

6. The oligomer according to any one of claims 1-5, wherein the contiguous nucleotide sequence is complementary to a corresponding region of a microRNA (miRNA) sequence selected from the group consisting of miR-21, miR-155, miR-221, miR-222, and miR-122.

7. The oligomer according to any one of claims 1-5, wherein said miRNA is selected from the group consisting of miR-1, miR-10b, miR-29, miR-125b, miR-126, miR-133, miR-141, miR-143, miR-200b, miR-206, miR-208, miR-302, miR-372, miR-373, miR-375, and miR-520c/e.

8. The oligomer according to any one of claims 1-5, wherein the contiguous nucleotide sequence is complementary to a corresponding region of a microRNA (miRNA) sequence present in the miR 17-92 cluster, such as a microRNA selected from the group consisting of miR-17-5p, miR-20a/b, miR-93, miR-106a/b, miR-18a/b, miR-19a/b, miR-25, miR-92a, miR-363.

9. The oligomer according to any one of claims 1-5, wherein the contiguous nucleotide sequence is complementary to a corresponding region of a mammalian, human or viral microRNA (miRNA) sequence selected from the group of miRNAs listed in table 1.

10. The oligomer according to any one of claims 1-5, wherein the contiguous nucleotide sequence is complementary to a corresponding region of a mammalian, human or viral microRNA (miRNA) sequence selected from the group of miRNAs from SEQ ID No 1-558 as disclosed in WO2008/046911.

11. The oligomer according to any one of claims 1-10, wherein the contiguous nucleotide sequence of the oligomer consists of or comprises a sequence which is complementary to the seed sequence of said microRNA.

12. The oligomer according to any one of claims 1-11, wherein the contiguous nucleotide sequence of the oligomer consists of or comprises a sequence selected from any one of the 7mer, 8mer or 9mer seedmer sequences listed in table 1.

13. The oligomer according to claim 11 or 12, wherein the 3′ nucleotide of the seedmer forms the 3′ most nucleotide of the contiguous nucleotide sequence, wherein the contiguous nucleotide sequence may, optionally, comprise one or two further 5′ nucleotides.

14. The oligomer according to any one of claims 1-13, wherein said contiguous nucleotide sequence of the oligomer does not comprise a nucleotide which corresponds to the first nucleotide present in the micro-RNA sequence counted from the 5′ end.

15. The oligomer according to any one of claims 1-14, wherein the nucleotide analogue units are selected from the group consisting of 2′-O_alkyl-RNA unit, 2′-OMe-RNA unit, 2′-amino-DNA unit, 2′-fluoro-DNA unit, LNA unit, and a 2′-MOE RNA unit.

16. The oligomer according to any one of claims 1-15, wherein the nucleotide analogue units are Locked Nucleic Acid (LNA) nucleotide analogue units.

17. The oligomer according to any one of claims 1-16, wherein the contiguous nucleotide sequence of the oligomer is complementary to the corresponding sequence of at least two miRNA sequences such as 2, 3, 4, 5, 6, 7, 8, 9, or 10 miRNA sequences, optionally with the use of a single universal nucleotide within the oligomer contiguous nucleotide sequence.

18. The oligomer according to claim 17, wherein the contiguous nucleotide sequence of the oligomer consists or comprises of a sequence which is complementary to the sequence of at least two miRNA seed region sequences such as 2, 3, 4, 5, 6, 7, 8, 9, or 10 miRNA seed region sequences.

19. The oligomer according to any one of claim 17 or 18, wherein the contiguous nucleotide sequence is complementary to the corresponding region of both miR-221 and miR-222.

20. The oligomer according to claim 19, wherein the contiguous nucleotide sequence consists or comprises of a sequence that is complementary to 5′GCUACAU3′.

21. The oligomer according to any one of claims 1-20, wherein the contiguous nucleotide sequence is complementary to a corresponding region of hsa-miR-122.

22. The oligomer according to claim 21, for use in the treatment of a medical disorder or disease selected from the group consisting of: hepatitis C virus infection and hypercholesterolemia and related disorders.

23. The oligomer according to any one of claims 1-22 as a medicament.

24. The oligomer according to any one of claims 1-23, for use in medicine, such as for the treatment of a disease or medical disorder associated with the presence or over-expression of the microRNA.

25. A pharmaceutical composition comprising the oligomer according to any one of claims 1-23, and a pharmaceutically acceptable diluent, carrier, salt of adjuvant.

26. The pharmaceutical composition according to claim 25, wherein the oligomer is as according to claim 21 or 22 and the composition further comprises a second independent active ingredient that is an inhibitor of the VLDL assembly pathway, such as an ApoB inhibitor, or an MTP inhibitor.

27. A kit comprising a pharmaceutical composition comprising the oligomer according to claim 21 or 22, and a second independent active ingredient that is an inhibitor of the VLDL assembly pathway, such as an ApoB inhibitor, or an MTP inhibitor.

28. A method for the treatment of a disease or medical disorder associated with the presence or over-expression of a microRNA, comprising the step of administering a the pharmaceutical composition according to any one of claims 25-26 to a patient who is suffering from, or is likely to suffer from said disease or medical disorder.

29. A conjugate comprising the oligomer according to any one of claims 1-24 and at least one non-nucleotide compounds.

30. The use of an oligomer or a conjugate as defined in any one of the proceeding claims, for the manufacture of a medicament for the treatment of a disease or medical disorder associated with the presence or over-expression of the microRNA.

31. The use of an oligomer or a conjugate as defined in any one of the proceeding claims, for inhibiting the mircoRNA in a cell which comprises said microRNA.

32. A method for reducing the amount, or effective amount, of a miRNA in a cell, comprising administering an oligomer, a conjugate or a pharmaceutical composition, according to any one of the proceeding claims to the cell which is expressing said miRNA so as to reduce the amount, or effective amount of the miRNA in the cell.

33. A method for de-repression of one or more mRNAs whose expression is repressed by a miRNA in a cell comprising administering an oligomer, a conjugate or a pharmaceutical composition, according to any one of the preceeding claims to the cell which expresses both said mRNA and said miRNA, in order to de-repress the expression of the mRNA.

The application's sequence listing, which the Patent Office published only in electronic form, follows.

SEQUENCE LISTING (3787 sequences)

SEQ ID NO: 1 - DNA, 15 bp, artificial
  LNA Oligomer, optionally fully LNA phosphorothioate
  misc_feature (1)..(15): Phosphorothioate linkages, LNAs at positions 1, 3, 4, 6, 7, 8, 10, 12, 14 & 15 otherwise DNAnts.
  misc_feature (1)..(15): Optionally fully phosphorothioate linkages, LNAs at positions 1, 3, 4, 6, 7, 8, 10, 12, 14 & 15 otherwise DNAnts.
tcagtctgataagct

SEQ ID NO: 2 - DNA, 8 bp, artificial
  LNA Oligomer
  misc_feature (1)..(8): Fully LNA & Phosphorothioate linkages
gataagct

SEQ ID NO: 3 - DNA, 15 bp, artificial
  LNA Oligomer
  misc_feature (1)..(15): Phosphorothioate linkages, LNAs at positions 1, 3, 5, 6, 7, 10, 11, 12, 14 & 15 otherwise DNAnts.
tcacaattagcatta

SEQ ID NO: 4 - DNA, 8 bp, artificial
  LNA Oligomer
  misc_feature (1)..(8): Fully LNA & Phosphorothioate linkages
tagcatta

SEQ ID NO: 5 - DNA, 15 bp, artificial
  LNA Oligomer
  misc_feature (1)..(15): Phosphorothioate linkages, LNAs at positions 1, 3, 6, 7, 8, 10, 12, 14 & 15 otherwise DNAnts.
ccattgtcacactcc

SEQ ID NO: 6 - DNA, 8 bp, artificial
  LNA Oligomer
  misc_feature (1)..(8): Fully LNA & Phosphorothioate linkages
cacactcc

SEQ ID NO: 7 - DNA, 6 bp, artificial
  LNA Oligomer
  misc_feature (1)..(6): Fully LNA & Phosphorothioate linkages
taagct

SEQ ID NO: 8 - DNA, 7 bp, artificial
  LNA Oligomer
  misc_feature (1)..(7): Fully LNA & Phosphorothioate linkages
ataagct

SEQ ID NO: 9 - DNA, 9 bp, artificial
  LNA Oligomer
  misc_feature (1)..(9): Fully LNA & Phosphorothioate linkages
tgataagct

SEQ ID NO: 10 - DNA, 10 bp, artificial
  LNA Oligomer
  misc_feature (1)..(10): Fully LNA & Phosphorothioate linkages
ctgataagct

SEQ ID NO: 11 - DNA, 12 bp, artificial
  LNA Oligomer
  misc_feature (1)..(12): Fully LNA & Phosphorothioate linkages
gtctgataagct

SEQ ID NO: 12 - DNA, 14 bp, artificial
  LNA Oligomer
  misc_feature (1)..(14): Fully LNA & Phosphorothioate linkages
cagtctgataagct

SEQ ID NO: 13 - DNA, 8 bp, artificial
  LNA Oligomer
  misc_feature (1)..(8): Fully LNA & Phosphorothioate linkages
tctgataa

SEQ ID NO: 14 - DNA, 8 bp, artificial
  LNA Oligomer
  misc_feature (1)..(8): Fully LNA & Phosphorothioate linkages
atcagtct

SEQ ID NO: 15 - DNA, 8 bp, artificial
  LNA Oligomer
  misc_feature (1)..(8): Fully LNA & Phosphorothioate linkages
tcaacatc

SEQ ID NO: 16 - DNA, 8 bp, artificial
  LNA Oligomer
  misc_feature (1)..(8): Fully LNA & Phosphorothioate linkages
ggtaaact

SEQ ID NO: 17 - DNA, 8 bp, artificial
  LNA Oligomer
  misc_feature (1)..(8): Fully LNA & Phosphorothioate linkages
cgtaatga

SEQ ID NO: 18 - DNA, 16 bp, artificial
  LNA Oligomer
  misc_feature (1)..(16): LNA gapmer 3LNA- 9DNA-3LNA-1DNA, 5' FAM label, phosphorothioate linkages.
tcagtctgataagcta

SEQ ID NO: 19 - DNA, 8 bp, artificial
  LNA Oligomer
  misc_feature (1)..(8): Full LNA & Phosphorothioate linkages
agcacttt

SEQ ID NO: 20 - DNA, 8 bp, artificial
  LNA Oligomer
  misc_feature (1)..(8): Full LNA & Phosphorothioate linkages
atttgcac

SEQ ID NO: 21 - DNA, 15 bp, artificial
  LNA Oligomer
agcagacaatgtagc

SEQ ID NO: 22 - DNA, 15 bp, artificial
  LNA Oligomer
gtagccagatgtagc

SEQ ID NO: 23 - DNA, 7 bp, artificial
  LNA Oligomer
  misc_feature (1)..(7): Full LNA & Phosphorothioate linkages
atgtagc

SEQ ID NO: 24 - DNA, 15 bp, artificial
  LNA Oligomer
acaacctactacctc

SEQ ID NO: 25 - DNA, 8 bp, artificial
  LNA Oligomer
  misc_feature (1)..(8): Full LNA & Phosphorothioate linkages
actacctc

SEQ ID NO: 26 - DNA, 15 bp, artificial
  LNA Oligomer
cactgtcagcacttt

SEQ ID NO: 27 - DNA, 15 bp, artificial
  LNA Oligomer
tgcatagatttgcac

SEQ ID NO: 28 - DNA, 7 bp, artificial
  LNA Oligomer
  misc_feature (1)..(7): Full LNA & Phosphorothioate linkages
gtagact

SEQ ID NO: 29 - DNA, 6 bp, artificial
  LNA Oligomer
  misc_feature (1)..(6): Full LNA & Phosphorothioate linkages
tacctc

SEQ ID NO: 30 - DNA, 7 bp, artificial
  LNA Oligomer
  misc_feature (1)..(7): Full LNA & Phosphorothioate linkages
ctacctc

SEQ ID NO: 31 - DNA, 9 bp, artificial
  LNA Oligomer
  misc_feature (1)..(9): Full LNA & Phosphorothioate linkages, N = Universal base
tnctacctc

SEQ ID NO: 32 - DNA, 9 bp, artificial
  LNA Oligomer
  misc_feature (1)..(9): Full LNA & Phosphorothioate linkages, N = Universal base
tnctacctc

SEQ ID NO: 33 - DNA, 15 bp, artificial
  LNA Oligomer
gcaacctactacctc

SEQ ID NO: 34 - DNA, 15 bp, artificial
  LNA Oligomer
acaacctcctacctc

SEQ ID NO: 35 - DNA, 15 bp, artificial
  LNA Oligomer
acaaactactacctc

SEQ ID NO: 36 - DNA, 7 bp, artificial
  LNA Oligomer
  misc_feature (1)..(7): Full LNA & Phosphorothioate linkages,
ctacctc

SEQ ID NO: 37 - DNA, 7 bp, artificial
  LNA Oligomer
  misc_feature (1)..(7): Full LNA & Phosphorothioate linkages,
ctaactc

SEQ ID NO: 38 - DNA, 9 bp, artificial
  LNA Oligomer
  misc_feature (1)..(9): Full LNA & Phosphorothioate linkages,
ttagcatta

SEQ ID NO: 39 - DNA, 9 bp, artificial
  LNA Oligomer
  misc_feature (1)..(9): Full LNA & Phosphorothioate linkages,
ttagcatta

SEQ ID NO: 40 - RNA, 22 nt, Epstein Barr virus
uagcaccgcuauccacuauguc

SEQ ID NO: 41 - RNA, 24 nt, Epstein Barr virus
ucuuaguggaagugacgugcugug

SEQ ID NO: 42 - RNA, 23 nt, Epstein Barr virus
uacauaaccauggaguuggcugu

SEQ ID NO: 43 - RNA, 22 nt, Epstein Barr virus
gccaccucuuugguucuguaca

SEQ ID NO: 44 - RNA, 21 nt, Epstein Barr virus
acgcacaccaggcugacugcc

SEQ ID NO: 45 - RNA, 24 nt, Epstein Barr virus
ucagacaguuuggugcgcuaguug

SEQ ID NO: 46 - RNA, 22 nt, Epstein Barr virus
uccugugguguuuggugugguu

SEQ ID NO: 47 - RNA, 23 nt, Epstein Barr virus
uguaacuugccagggacggcuga

SEQ ID NO: 48 - RNA, 22 nt, Epstein Barr virus
aaccggcucguggcucguacag

SEQ ID NO: 49 - RNA, 22 nt, Epstein Barr virus
uaaaugcugcaguaguagggau

SEQ ID NO: 50 - RNA, 22 nt, Epstein Barr virus
uacccuacgcugccgauuuaca

SEQ ID NO: 51 - RNA, 22 nt, Epstein Barr virus
gucagugguuuuguuuccuuga

SEQ ID NO: 52 - RNA, 24 nt, Epstein Barr virus
uuagauagagugggugugugcucu

SEQ ID NO: 53 - RNA, 23 nt, Epstein Barr virus
uguaugccugguguccccuuagu

SEQ ID NO: 54 - RNA, 22 nt, Epstein Barr virus
uaagaggacgcaggcauacaag

SEQ ID NO: 55 - RNA, 22 nt, Epstein Barr virus
uaucggaaguuugggcuucguc

SEQ ID NO: 56 - RNA, 22 nt, Epstein Barr virus
ucaaguucgcacuuccuauaca

SEQ ID NO: 57 - RNA, 21 nt, Epstein Barr virus
uuuuguuugcuugggaaugcu

SEQ ID NO: 58 - RNA, 23 nt, Epstein Barr virus
acauuccccgcaaacaugacaug

SEQ ID NO: 59 - RNA, 24 nt, Epstein Barr virus
aaggagcgauuuggagaaaauaaa

SEQ ID NO: 60 - RNA, 22 nt, Epstein Barr virus
uauuuucugcauucgcccuugc

SEQ ID NO: 61 - RNA, 22 nt, Epstein Barr virus
caugaaggcacagccuguuacc

SEQ ID NO: 62 - RNA, 21 nt, Epstein Barr virus
uagcaggcaugucuucauucc

SEQ ID NO: 63 - RNA, 22 nt, Epstein Barr virus
cgcaccacuagucaccaggugu

SEQ ID NO: 64 - RNA, 21 nt, Epstein Barr virus
accuaguguuaguguugugcu

SEQ ID NO: 65 - RNA, 22 nt, Epstein Barr virus
gaccugaugcugcuggugugcu

SEQ ID NO: 66 - RNA, 24 nt, Epstein Barr virus
caaggugaauauagcugcccaucg

SEQ ID NO: 67 - RNA, 22 nt, Epstein Barr virus
cggggaucggacuagccuuaga

SEQ ID NO: 68 - RNA, 22 nt, Epstein Barr virus
uaagguugguccaauccauagg

SEQ ID NO: 69 - RNA, 22 nt, Epstein Barr virus
caucauaguccaguguccaggg

SEQ ID NO: 70 - RNA, 22 nt, Epstein Barr virus
ccuggaccuugacuaugaaaca

SEQ ID NO: 71 - RNA, 22 nt, Epstein Barr virus
uacgguuuccuagauuguacag

SEQ ID NO: 72 - RNA, 23 nt, Epstein Barr virus
gucacaaucuauggggucguaga

SEQ ID NO: 73 - RNA, 23 nt, Epstein Barr virus
uaacacuucaugggucccguagu

SEQ ID NO: 74 - RNA, 22 nt, Epstein Barr virus
uacuggacccugaauuggaaac

SEQ ID NO: 75 - RNA, 22 nt, Epstein Barr virus
uaaccugaucagccccggaguu

SEQ ID NO: 76 - RNA, 22 nt, Epstein Barr virus
uaucuuuugcggcagaaauuga

SEQ ID NO: 77 - RNA, 22 nt, Epstein Barr virus
aaauucuguugcagcagauagc

SEQ ID NO: 78 - RNA, 22 nt, Epstein Barr virus
uaacgggaaguguguaagcaca

SEQ ID NO: 79 - RNA, 22 nt, Human cytomegalovirus
aagugacggugagauccaggcu

SEQ ID NO: 80 - RNA, 21 nt, Human cytomegalovirus
ucguccuccccuucuucaccg

SEQ ID NO: 81 - RNA, 20 nt, Human cytomegalovirus
uaacuagccuucccgugaga

SEQ ID NO: 82 - RNA, 22 nt, Human cytomegalovirus
ucaccagaaugcuaguuuguag

SEQ ID NO: 83 - RNA, 22 nt, Human cytomegalovirus
ucguugaagacaccuggaaaga

SEQ ID NO: 84 - RNA, 22 nt, Human cytomegalovirus
uuuccagguguuuucaacgugc

SEQ ID NO: 85 - RNA, 20 nt, Human cytomegalovirus
ggggaugggcuggcgcgcgg

SEQ ID NO: 86 - RNA, 21 nt, Human cytomegalovirus
ugcgucucggccucguccaga

SEQ ID NO: 87 - RNA, 21 nt, Human cytomegalovirus
aaccgcucaguggcucggacc

SEQ ID NO: 88 - RNA, 22 nt, Human cytomegalovirus
uccgaacgcuaggucgguucuc

SEQ ID NO: 89 - RNA, 23 nt, Human cytomegalovirus
auccacuuggagagcucccgcgg

SEQ ID NO: 90 - RNA, 22 nt, Human cytomegalovirus
agcggucuguucagguggauga

SEQ ID NO: 91 - RNA, 20 nt, Human cytomegalovirus
ucacgguccgagcacaucca

SEQ ID NO: 92 - RNA, 22 nt, Human cytomegalovirus
gauugugcccggaccgugggcg

SEQ ID NO: 93 - RNA, 22 nt, Human cytomegalovirus
cgacauggacgugcagggggau

SEQ ID NO: 94 - RNA, 21 nt, Human cytomegalovirus
ugacaagccugacgagagcgu

SEQ ID NO: 95 - RNA, 22 nt, Human cytomegalovirus
uuaugauaggugugacgauguc

SEQ ID NO: 96 - RNA, 22 nt, Homo sapiens
ugagguaguagguuguauaguu

SEQ ID NO: 97 - RNA, 21 nt, Homo sapiens
cuauacaaucuacugucuuuc

SEQ ID NO: 98 - RNA, 22 nt, Homo sapiens
ugagguaguagguugugugguu

SEQ ID NO: 99 - RNA, 22 nt, Homo sapiens
cuauacaaccuacugccuuccc

SEQ ID NO: 100 - RNA, 22 nt, Homo sapiens
ugagguaguagguuguaugguu

SEQ ID NO: 101 - RNA, 22 nt, Homo sapiens
uagaguuacacccugggaguua

SEQ ID NO: 102 - RNA, 22 nt, Homo sapiens
agagguaguagguugcauaguu

SEQ ID NO: 103 - RNA, 22 nt, Homo sapiens
cuauacgaccugcugccuuucu

SEQ ID NO: 104 - RNA, 22 nt, Homo sapiens
ugagguaggagguuguauaguu

SEQ ID NO: 105 - RNA, 22 nt, Homo sapiens
cuauacggccuccuagcuuucc

SEQ ID NO: 106 - RNA, 22 nt, Homo sapiens
ugagguaguagauuguauaguu

SEQ ID NO: 107 - RNA, 22 nt, Homo sapiens
cuauacaaucuauugccuuccc

SEQ ID NO: 108 - RNA, 22 nt, Homo sapiens
cuauacagucuacugucuuucc

SEQ ID NO: 109 - RNA, 22 nt, Homo sapiens
ugagguaguaguuuguacaguu

SEQ ID NO: 110 - RNA, 21 nt, Homo sapiens
cuguacaggccacugccuugc

SEQ ID NO: 111 - RNA, 22 nt, Homo sapiens
ugagguaguaguuugugcuguu

SEQ ID NO: 112 - RNA, 22 nt, Homo sapiens
cugcgcaagcuacugccuugcu

SEQ ID NO: 113 - RNA, 22 nt, Homo sapiens
uggaauguaaagaaguauguau

SEQ ID NO: 114 - RNA, 22 nt, Homo sapiens
aacccguagauccgaacuugug

SEQ ID NO: 115 - RNA, 22 nt, Homo sapiens
caagcuuguaucuauagguaug

SEQ ID NO: 116 - RNA, 21 nt, Homo sapiens
uacaguacugugauaacugaa

SEQ ID NO: 117 - RNA, 22 nt, Homo sapiens
caguuaucacagugcugaugcu

SEQ ID NO: 118 - RNA, 23 nt, Homo sapiens
agcagcauuguacagggcuauga

SEQ ID NO: 119 - RNA, 23 nt, Homo sapiens
ucauagcccuguacaaugcugcu

SEQ ID NO: 120 - RNA, 23 nt, Homo sapiens
ucaaaugcucagacuccuguggu

SEQ ID NO: 121 - RNA, 22 nt, Homo sapiens
acggauguuugagcaugugcua

SEQ ID NO: 122 - RNA, 23 nt, Homo sapiens
aaaagugcuuacagugcagguag

SEQ ID NO: 123 - RNA, 22 nt, Homo sapiens
cugcaauguaagcacuucuuac

SEQ ID NO: 124 - RNA, 21 nt, Homo sapiens
uaaagugcugacagugcagau

SEQ ID NO: 125 - RNA, 22 nt, Homo sapiens
ccgcacuguggguacuugcugc

SEQ ID NO: 126 - RNA, 23 nt, Homo sapiens
agcagcauuguacagggcuauca

SEQ ID NO: 127 - RNA, 23 nt, Homo sapiens
uacccuguagauccgaauuugug

SEQ ID NO: 128 - RNA, 22 nt, Homo sapiens
caaauucguaucuaggggaaua

SEQ ID NO: 129 - RNA, 23 nt, Homo sapiens
uacccuguagaaccgaauuugug

SEQ ID NO: 130 - RNA, 22 nt, Homo sapiens
acagauucgauucuaggggaau

SEQ ID NO: 131 - RNA, 21 nt, Homo sapiens
uugcucacuguucuucccuag

SEQ ID NO: 132 - RNA, 21 nt, Homo sapiens
aagcauucuuucauugguugg

SEQ ID NO: 133 - RNA, 22 nt, Homo sapiens
uuuccggcucgcgugggugugu

SEQ ID NO: 134 - RNA, 21 nt, Homo sapiens
ccgucgccgccacccgagccg

SEQ ID NO: 135 - RNA, 23 nt, Homo sapiens
gagggucuugggagggaugugac

SEQ ID NO: 136 - RNA, 27 nt, Homo sapiens
cacuguaggugauggugagagugggca

SEQ ID NO: 137 - RNA, 23 nt, Homo sapiens
ccugcagcgacuugauggcuucc

SEQ ID NO: 138 - RNA, 21 nt, Homo sapiens
agaggauacccuuuguauguu

SEQ ID NO: 139 - RNA, 21 nt, Homo sapiens
uaggacacauggucuacuucu

SEQ ID NO: 140 - RNA, 22 nt, Homo sapiens
cuccugagccauucugagccuc

SEQ ID NO: 141 - RNA, 24 nt, Homo sapiens
agccugauuaaacacaugcucuga

SEQ ID NO: 142 - RNA, 21 nt, Homo sapiens
gugccagcugcagugggggag

SEQ ID NO: 143 - RNA, 21 nt, Homo sapiens
cccggagccaggaugcagcuc

SEQ ID NO: 144 - RNA, 21 nt, Homo sapiens
ucguggccuggucuccauuau

SEQ ID NO: 145 - RNA, 20 nt, Homo sapiens
ucugcaggguuugcuuugag

SEQ ID NO: 146 - RNA, 21 nt, Homo sapiens
uguucauguagauguuuaagc

SEQ ID NO: 147 - RNA, 18 nt, Homo sapiens
ucagcuggcccucauuuc

SEQ ID NO: 148 - RNA, 21 nt, Homo sapiens
uggcagggaggcugggagggg

SEQ ID NO: 149 - RNA, 20 nt, Homo sapiens
ucacuguucagacaggcgga

SEQ ID NO: 150 - RNA, 22 nt, Homo sapiens
uggagugugacaaugguguuug

SEQ ID NO: 151 - RNA, 22 nt, Homo sapiens
aacgccauuaucacacuaaaua

SEQ ID NO: 152 - RNA, 21 nt, Homo sapiens
ccccaccuccucucuccucag

SEQ ID NO: 153 - RNA, 19 nt, Homo sapiens
gugaggacucgggaggugg

SEQ ID NO: 154 - RNA, 22 nt, Homo sapiens
ugagccccugugccgcccccag

SEQ ID NO: 155 - RNA, 22 nt, Homo sapiens
guggguacggcccagugggggg

SEQ ID NO: 156 - RNA, 22 nt, Homo sapiens
ucaccagcccuguguucccuag

SEQ ID NO: 157 - RNA, 26 nt, Homo sapiens
gugagggcaugcaggccuggaugggg

SEQ ID NO: 158 - RNA, 20 nt, Homo sapiens
cgugccacccuuuuccccag

SEQ ID NO: 159 - RNA, 20 nt, Homo sapiens
ucacaccugccucgcccccc

SEQ ID NO: 160 - RNA, 21 nt, Homo sapiens
gugggcgggggcaggugugug

SEQ ID NO: 161 - RNA, 23 nt, Homo sapiens
cucucaccacugcccucccacag

SEQ ID NO: 162 - RNA, 20 nt, Homo sapiens
gugucugggcggacagcugc

SEQ ID NO: 163 - RNA, 20 nt, Homo sapiens
ugagcccuguccucccgcag

SEQ ID NO: 164 - RNA, 22 nt, Homo sapiens
ucggccugaccacccaccccac

SEQ ID NO: 165 - RNA, 22 nt, Homo sapiens
ccucuuccccuugucucuccag

SEQ ID NO: 166 - RNA, 21 nt, Homo sapiens
uccuucugcuccgucccccag

SEQ ID NO: 167 - RNA, 20 nt, Homo sapiens
cuuccucgucugucugcccc

SEQ ID NO: 168 - RNA, 20 nt, Homo sapiens
uaaggcacgcggugaaugcc

SEQ ID NO: 169 - RNA, 22 nt, Homo sapiens
cguguucacagcggaccuugau

SEQ ID NO: 170 - RNA, 22 nt, Homo sapiens
aacuggaucaauuauaggagug

SEQ ID NO: 171 - RNA, 26 nt, Homo sapiens
aaguaguugguuuguaugagaugguu

SEQ ID NO: 172 - RNA, 21 nt, Homo sapiens
aagugaucuaaaggccuacau

SEQ ID NO: 173 - RNA, 19 nt, Homo sapiens
aauggauuuuuggagcagg

SEQ ID NO: 174 - RNA, 22 nt, Homo sapiens
acccgucccguucguccccgga

SEQ ID NO: 175 - RNA, 27 nt, Homo sapiens
accuucuuguauaagcacugugcuaaa

SEQ ID NO: 176 - RNA, 22 nt, Homo sapiens
acgcccuucccccccuucuuca

SEQ ID NO: 177 - RNA, 21 nt, Homo sapiens
acggugcuggauguggccuuu

SEQ ID NO: 178 - RNA, 21 nt, Homo sapiens
acucuagcugccaaaggcgcu

SEQ ID NO: 179 - RNA, 22 nt, Homo sapiens
agaaggaaauugaauucauuua

SEQ ID NO: 180 - RNA, 21 nt, Homo sapiens
agagaagaagaucagccugca

SEQ ID NO: 181 - RNA, 24 nt, Homo sapiens
agccuggaagcuggagccugcagu

SEQ ID NO: 182 - RNA, 23 nt, Homo sapiens
aggaugagcaaagaaaguagauu

SEQ ID NO: 183 - RNA, 22 nt, Homo sapiens
cggaugagcaaagaaagugguu

SEQ ID NO: 184 - RNA, 22 nt, Homo sapiens
aggcauugacuucucacuagcu

SEQ ID NO: 185 - RNA, 21 nt, Homo sapiens
agugaaugauggguucugacc

SEQ ID NO: 186 - RNA, 21 nt, Homo sapiens
aguuaggauuaggucguggaa

SEQ ID NO: 187 - RNA, 21 nt, Homo sapiens
auauaugaugacuuagcuuuu

SEQ ID NO: 188 - RNA, 22 nt, Homo sapiens
acaggugagguucuugggagcc

SEQ ID NO: 189 - RNA, 24 nt, Homo sapiens
ucccugagacccuuuaaccuguga

SEQ ID NO: 190 - RNA, 22 nt, Homo sapiens
ucccugagacccuaacuuguga

SEQ ID NO: 191 - RNA, 22 nt, Homo sapiens
acggguuaggcucuugggagcu

SEQ ID NO: 192 - RNA, 22 nt, Homo sapiens
ucacaagucaggcucuugggac

SEQ ID NO: 193 - RNA, 22 nt, Homo sapiens
ucguaccgugaguaauaaugcg

SEQ ID NO: 194 - RNA, 21 nt, Homo sapiens
cauuauuacuuuugguacgcg

SEQ ID NO: 195 - RNA, 18 nt, Homo sapiens
aucccaccucugccacca

SEQ ID NO: 196 - RNA, 19 nt, Homo sapiens
auggauaaggcuuuggcuu

SEQ ID NO: 197 - RNA, 22 nt, Homo sapiens
augggugaauuuguagaaggau

SEQ ID NO: 198 - RNA, 22 nt, Homo sapiens
augguacccuggcauacugagu

SEQ ID NO: 199 - RNA, 23 nt, Homo sapiens
caagucuuauuugagcaccuguu

SEQ ID NO: 200 - RNA, 22 nt, Homo sapiens
caggauguggucaaguguuguu

SEQ ID NO: 201 - RNA, 23 nt, Homo sapiens
ccucagggcuguagaacagggcu

SEQ ID NO: 202 - RNA, 21 nt, Homo sapiens
ccuguugaaguguaaucccca

SEQ ID NO: 203 - RNA, 18 nt, Homo sapiens
cgggcguggugguggggg

SEQ ID NO: 204 - RNA, 22 nt, Homo sapiens
cuggacugagccgugcuacugg

SEQ ID NO: 205 - RNA, 22 nt, Homo sapiens
ucggauccgucugagcuuggcu

SEQ ID NO: 206 - RNA, 22 nt, Homo sapiens
cugaagcucagagggcucugau

SEQ ID NO: 207 - RNA, 23 nt, Homo sapiens
cuggagauauggaagagcugugu

SEQ ID NO: 208 - RNA, 22 nt, Homo sapiens
cuuggcaccuagcaagcacuca

SEQ ID NO: 209 - RNA, 26 nt, Homo sapiens
gaugaugauggcagcaaauucugaaa

SEQ ID NO: 210 - RNA, 25 nt, Homo sapiens
gggcgacaaagcaagacucuuucuu

SEQ ID NO: 211 - RNA, 18 nt, Homo sapiens
gucccuguucaggcgcca

SEQ ID NO: 212 - RNA, 17 nt, Homo sapiens
ucccuguucgggcgcca

SEQ ID NO: 213 - RNA, 17 nt, Homo sapiens
gugggggagaggcuguc

SEQ ID NO: 214 - RNA, 20 nt, Homo sapiens
uaaagagcccuguggagaca

SEQ ID NO: 215 - RNA, 22 nt, Homo sapiens
uacguagauauauauguauuuu

SEQ ID NO: 216 - RNA, 22 nt, Homo sapiens
uaguacugugcauaucaucuau

SEQ ID NO: 217 - RNA, 17 nt, Homo sapiens
ucauauugcuucuuucu

SEQ ID NO: 218 - RNA, 21 nt, Homo sapiens
ucacagugaaccggucucuuu

SEQ ID NO: 219 - RNA, 17 nt, Homo sapiens
ucccaccgcugccaccc

SEQ ID NO: 220 - RNA, 17 nt, Homo sapiens
ucgccuccuccucuccc

SEQ ID NO: 221 - RNA, 20 nt, Homo sapiens
ucguuugccuuuuucugcuu

SEQ ID NO: 222 - RNA, 22 nt, Homo sapiens
ucuacaaaggaaagcgcuuucu

SEQ ID NO: 223 - RNA, 22 nt, Homo sapiens
ucuauacagacccuggcuuuuc

SEQ ID NO: 224 - RNA, 22 nt, Homo sapiens
ucugggcaacaaagugagaccu

SEQ ID NO: 225 - RNA, 21 nt, Homo sapiens
ugcaggaccaagaugagcccu

SEQ ID NO: 226 - RNA, 22 nt, Homo sapiens
ugcuggaucagugguucgaguc

SEQ ID NO: 227 - RNA, 21 nt, Homo sapiens
uggacugcccugaucuggaga

SEQ ID NO: 228 - RNA, 23 nt, Homo sapiens
uggaguccaggaaucugcauuuu

SEQ ID NO: 229 - RNA, 22 nt, Homo sapiens
aagcccuuaccccaaaaaguau

SEQ ID NO: 230 - RNA, 22 nt, Homo sapiens
aagcccuuaccccaaaaagcau

SEQ ID NO: 231 - RNA, 21 nt, Homo sapiens
cuuuuugcggucugggcuugc

SEQ ID NO: 232 - RNA, 19 nt, Homo sapiens
uggauuuuuggaucaggga

SEQ ID NO: 233 - RNA, 24 nt, Homo sapiens
uggcccugacugaagaccagcagu

SEQ ID NO: 234 - RNA, 25 nt, Homo sapiens
ugggaacggguuccggcagacgcug

SEQ ID NO: 235 - RNA, 22 nt, Homo sapiens
uggguggucuggagauuugugc

SEQ ID NO: 236 - RNA, 22 nt, Homo sapiens
ugugagguuggcauuguugucu

SEQ ID NO: 237 - RNA, 21 nt, Homo sapiens
uuaggccgcagaucuggguga

SEQ ID NO: 238 - RNA, 22 nt, Homo sapiens
uuagggcccuggcuccaucucc

SEQ ID NO: 239 - RNA, 17 nt, Homo sapiens
uucaaguaauucaggug

SEQ ID NO: 240 - RNA, 22 nt, Homo sapiens
uucauucggcuguccagaugua

SEQ ID NO: 241 - RNA, 22 nt, Homo sapiens
uucuggaauucugugugaggga

SEQ ID NO: 242 - RNA, 18 nt, Homo sapiens
uugagaaggaggcugcug

SEQ ID NO: 243 - RNA, 24 nt, Homo sapiens
uugcagcugccugggagugacuuc

SEQ ID NO: 244 - RNA, 21 nt, Homo sapiens
uugggacauacuuaugcuaaa

SEQ ID NO: 245 - RNA, 22 nt, Homo sapiens
uuuagagacggggucuugcucu

SEQ ID NO: 246 - RNA, 22 nt, Homo sapiens
uuugaggcuacagugagaugug

SEQ ID NO: 247 - RNA, 22 nt, Homo sapiens
uuuucaacucuaaugggagaga

SEQ ID NO: 248 - RNA, 18 nt, Homo sapiens
acguuggcucugguggug

SEQ ID NO: 249 - RNA, 22 nt, Homo sapiens
acucggcguggcgucggucgug

SEQ ID NO: 250 - RNA, 18 nt, Homo sapiens
gcaugggugguucagugg

SEQ ID NO: 251 - RNA, 22 nt, Homo sapiens
cagugcaauguuaaaagggcau

SEQ ID NO: 252 - RNA, 22 nt, Homo sapiens
uucacauugugcuacugucugc

SEQ ID NO: 253 - RNA, 22 nt, Homo sapiens
cagugcaaugaugaaagggcau

SEQ ID NO: 254 - RNA, 21 nt, Homo sapiens
acucuuucccuguugcacuac

SEQ ID NO: 255 - RNA, 22 nt, Homo sapiens
uaacagucuacagccauggucg

SEQ ID NO: 256 - RNA, 22 nt, Homo sapiens
accguggcuuucgauuguuacu

SEQ ID NO: 257 - RNA, 18 nt, Homo sapiens
cagggaggugaaugugau

SEQ ID NO: 258 - RNA, 19 nt, Homo sapiens
gaugaugcugcugaugcug

SEQ ID NO: 259 - RNA, 22 nt, Homo sapiens
ucaaaacugaggggcauuuucu

SEQ ID NO: 260 - RNA, 24 nt, Homo sapiens
ccagacagaauucuaugcacuuuc

SEQ ID NO: 261 - RNA, 22 nt, Homo sapiens
uuugguccccuucaaccagcug

SEQ ID NO: 262 - RNA, 22 nt, Homo sapiens
uuugguccccuucaaccagcua

SEQ ID NO: 263 - RNA, 22 nt, Homo sapiens
ugugacugguugaccagagggg

SEQ ID NO: 264 - RNA, 23 nt, Homo sapiens
uauggcuuuuuauuccuauguga

SEQ ID NO: 265 - RNA, 22 nt, Homo sapiens
uauagggauuggagccguggcg

SEQ ID NO: 266 - RNA, 23 nt, Homo sapiens
uauggcuuuucauuccuauguga

SEQ ID NO: 267 - RNA, 22 nt, Homo sapiens
auguagggcuaaaagccauggg

SEQ ID NO: 268 - RNA, 23 nt, Homo sapiens
acuccauuuguuuugaugaugga

SEQ ID NO: 269 - RNA, 22 nt, Homo sapiens
caucaucgucucaaaugagucu

SEQ ID NO: 270 - RNA, 23 nt, Homo sapiens
uuauugcuuaagaauacgcguag

SEQ ID NO: 271 - RNA, 23 nt, Homo sapiens
agcugguguugugaaucaggccg

SEQ ID NO: 272 - RNA, 22 nt, Homo sapiens
gcuacuucacaacaccagggcc

SEQ ID NO: 273 - RNA, 22 nt, Homo sapiens
gcuauuucacgacaccaggguu

SEQ ID NO: 274 - RNA, 22 nt, Homo sapiens
ggagacgcggcccuguuggagu

SEQ ID NO: 275 - RNA, 22 nt, Homo sapiens
ucuacagugcacgugucuccag

SEQ ID NO: 276 - RNA, 21 nt, Homo sapiens
uaccacaggguagaaccacgg

SEQ ID NO: 277 - RNA, 22 nt, Homo sapiens
cagugguuuuacccuaugguag

SEQ ID NO: 278 - RNA, 22 nt, Homo sapiens
uaacacugucugguaaagaugg

SEQ ID NO: 279 - RNA, 22 nt, Homo sapiens
caucuuccaguacaguguugga

SEQ ID NO: 280 - RNA, 23 nt, Homo sapiens
uguaguguuuccuacuuuaugga

SEQ ID NO: 281 - RNA, 21 nt, Homo sapiens
cauaaaguagaaagcacuacu

SEQ ID NO: 282 - RNA, 21 nt, Homo sapiens
ugagaugaagcacuguagcuc

SEQ ID NO: 283 - RNA, 22 nt, Homo sapiens
ggugcagugcugcaucucuggu

SEQ ID NO: 284 - RNA, 20 nt, Homo sapiens
uacaguauagaugauguacu

SEQ ID NO: 285 - RNA, 22 nt, Homo sapiens
ggauaucaucauauacuguaag

SEQ ID NO: 286 - RNA, 23 nt, Homo sapiens
guccaguuuucccaggaaucccu

SEQ ID NO: 287 - RNA, 22 nt, Homo sapiens
ggauuccuggaaauacuguucu

SEQ ID NO: 288 - RNA, 21 nt, Homo sapiens
cuccguuugccuguuucgcug

SEQ ID NO: 289 - RNA, 22 nt, Homo sapiens
cucggcgcggggcgcgggcucc

SEQ ID NO: 290 - RNA, 22 nt, Homo sapiens
ugagaacugaauuccauggguu

SEQ ID NO: 291 - RNA, 22 nt, Homo sapiens
ccucugaaauucaguucuucag

SEQ ID NO: 292 - RNA, 22 nt, Homo sapiens
ugcccuguggacucaguucugg

SEQ ID NO: 293 - RNA, 22 nt, Homo sapiens
ugagaacugaauuccauaggcu

SEQ ID NO: 294 - RNA, 20 nt, Homo sapiens
guguguggaaaugcuucugc

SEQ ID NO: 295 - RNA, 21 nt, Homo sapiens
gcccuccgcccgugcaccccg

SEQ ID NO: 296 - RNA, 22 nt, Homo sapiens
gcccgcguguggagccaggugu

SEQ ID NO: 297 - RNA, 22 nt, Homo sapiens
gugugcggaaaugcuucugcua

SEQ ID NO: 298 - RNA, 22 nt, Homo sapiens
ucagugcacuacagaacuuugu

SEQ ID NO: 299 - RNA, 22 nt, Homo sapiens
aaaguucugagacacuccgacu

SEQ ID NO: 300 - RNA, 22 nt, Homo sapiens
ucagugcaucacagaacuuugu

SEQ ID NO: 301 - RNA, 22 nt, Homo sapiens
aaguucuguuauacacucaggc

SEQ ID NO: 302 - RNA, 23 nt, Homo sapiens
ucuggcuccgugucuucacuccc

SEQ ID NO: 303 - RNA, 21 nt, Homo sapiens
agggagggacgggggcugugc

SEQ ID NO: 304 - RNA, 22 nt, Homo sapiens
ucucccaacccuuguaccagug

SEQ ID NO: 305 - RNA, 22 nt, Homo sapiens
cugguacaggccugggggacag

SEQ ID NO: 306 - RNA, 21 nt, Homo sapiens
cuagacugaagcuccuugagg

SEQ ID NO: 307 - RNA, 21 nt, Homo sapiens
ucgaggagcucacagucuagu

SEQ ID NO: 308 - RNA, 21 nt, Homo sapiens
ucagugcaugacagaacuugg

SEQ ID NO: 309 - RNA, 22 nt, Homo sapiens
uugcauagucacaaaagugauc

SEQ ID NO: 310 - RNA, 22 nt, Homo sapiens
aaaaccgucuaguuacaguugu

SEQ ID NO: 311 - RNA, 23 nt, Homo sapiens
cggcccgggcugcugcuguuccu

SEQ ID NO: 312 - RNA, 21 nt, Homo sapiens
uccugcgcgucccagaugccc

SEQ ID NO: 313 - RNA, 22 nt, Homo sapiens
uagguuauccguguugccuucg

SEQ ID NO: 314 - RNA, 22 nt, Homo sapiens
aaucauacacgguugaccuauu

SEQ ID NO: 315 - RNA, 23 nt, Homo sapiens
uuaaugcuaaucgugauaggggu

SEQ ID NO: 316 - RNA, 22 nt, Homo sapiens
cuccuacauauuagcauuaaca

SEQ ID NO: 317 - RNA, 22 nt, Homo sapiens
uagcagcacauaaugguuugug

SEQ ID NO: 318 - RNA, 22 nt, Homo sapiens
caggccauauugugcugccuca

SEQ ID NO: 319 - RNA, 22 nt, Homo sapiens
uagcagcacaucaugguuuaca

SEQ ID NO: 320 - RNA, 22 nt, Homo sapiens
cgaaucauuauuugcugcucua

SEQ ID NO: 321 - RNA, 22 nt, Homo sapiens
uagcagcacguaaauauuggcg

SEQ ID NO: 322 - RNA, 22 nt, Homo sapiens
ccaguauuaacugugcugcuga

SEQ ID NO: 323 - RNA, 22 nt, Homo sapiens
ccaauauuacugugcugcuuua

SEQ ID NO: 324 - RNA, 23 nt, Homo sapiens
caaagugcuuacagugcagguag

SEQ ID NO: 325 - RNA, 22 nt, Homo sapiens
acugcagugaaggcacuuguag

SEQ ID NO: 326 - RNA, 23 nt, Homo sapiens
aacauucaacgcugucggugagu

SEQ ID NO: 327 - RNA, 22 nt, Homo sapiens
accaucgaccguugauuguacc

SEQ ID NO: 328 - RNA, 22 nt, Homo sapiens
accacugaccguugacuguacc

SEQ ID NO: 329 - RNA, 23 nt, Homo sapiens
aacauucauugcugucggugggu

SEQ ID NO: 330 - RNA, 22 nt, Homo sapiens
aacauucaaccugucggugagu

SEQ ID NO: 331 - RNA, 22 nt, Homo sapiens
aaccaucgaccguugaguggac

SEQ ID NO: 332 - RNA, 23 nt, Homo sapiens
aacauucauuguugucggugggu

SEQ ID NO: 333 - RNA, 24 nt, Homo sapiens
uuuggcaaugguagaacucacacu

SEQ ID NO: 334 - RNA, 21 nt, Homo sapiens
ugguucuagacuugccaacua

SEQ ID NO: 335 - RNA, 18 nt, Homo sapiens
uccagugcccuccucucc

SEQ ID NO: 336 - RNA, 27 nt, Homo sapiens
auugaucaucgacacuucgaacgcaau

SEQ ID NO: 337 - RNA, 18 nt, Homo sapiens
ugaggcaguagauugaau

SEQ ID NO: 338 - RNA, 22 nt, Homo sapiens
uauggcacugguagaauucacu

SEQ ID NO: 339 - RNA, 22 nt, Homo sapiens
gugaauuaccgaagggccauaa

SEQ ID NO: 340 - RNA, 22 nt, Homo sapiens
uggacggagaacugauaagggu

SEQ ID NO: 341 - RNA, 22 nt, Homo sapiens
uggagagaaaggcaguuccuga

SEQ ID NO: 342 - RNA, 22 nt, Homo sapiens
aggggcuggcuuuccucugguc

SEQ ID NO: 343 - RNA, 22 nt, Homo sapiens
caaagaauucuccuuuugggcu

SEQ ID NO: 344 - RNA, 22 nt, Homo sapiens
gcccaaaggugaauuuuuuggg

SEQ ID NO: 345 - RNA, 22 nt, Homo sapiens
ucgugucuuguguugcagccgg

SEQ ID NO: 346 - RNA, 22 nt, Homo sapiens
ggcuacaacacaggacccgggc

SEQ ID NO: 347 - RNA, 21 nt, Homo sapiens
cucccacaugcaggguuugca

SEQ ID NO: 348 - RNA, 21 nt, Homo sapiens
caucccuugcaugguggaggg

SEQ ID NO: 349 - RNA, 23 nt, Homo sapiens
uaaggugcaucuagugcagauag

SEQ ID NO: 350 - RNA, 23 nt, Homo sapiens
acugcccuaagugcuccuucugg

SEQ ID NO: 351 - RNA, 23 nt, Homo sapiens
uaaggugcaucuagugcaguuag

SEQ ID NO: 352 - RNA, 22 nt, Homo sapiens
ugcccuaaaugccccuucuggc

SEQ ID NO: 353 - RNA, 22 nt, Homo sapiens
ugauauguuugauauauuaggu

SEQ ID NO: 354 - RNA, 21 nt, Homo sapiens
cggcggggacggcgauugguc

SEQ ID NO: 355 - RNA, 22 nt, Homo sapiens
cgcaggggccgggugcucaccg

SEQ ID NO: 356 - RNA, 21 nt, Homo sapiens
ugagugccggugccugcccug

SEQ ID NO: 357 - RNA, 21 nt, Homo sapiens
ugauauguuugauauuggguu

SEQ ID NO: 358 - RNA, 23 nt, Homo sapiens
caacggaaucccaaaagcagcug

SEQ ID NO: 359 - RNA, 22 nt, Homo sapiens
gcugcgcuuggauuucgucccc

SEQ ID NO: 360 - RNA, 21 nt, Homo sapiens
ccaguccugugccugccgccu

SEQ ID NO: 361 - RNA, 23 nt, Homo sapiens
ugaguaccgccaugucuguuggg

SEQ ID NO: 362 - RNA, 20 nt, Homo sapiens
caccaggcauuguggucucc

SEQ ID NO: 363 - RNA, 22 nt, Homo sapiens
uacccagagcaugcagugugaa

SEQ ID NO: 364 - RNA, 22 nt, Homo sapiens
ucugcccccuccgcugcugcca

SEQ ID NO: 365 - RNA, 22 nt, Homo sapiens
cccugugcccggcccacuucug

SEQ ID NO: 366 - RNA, 22 nt, Homo sapiens
ggaggggucccgcacugggagg

SEQ ID NO: 367 - RNA, 20 nt, Homo sapiens
ccccagggcgacgcggcggg

SEQ ID NO: 368 - RNA, 22 nt, Homo sapiens
accuugccuugcugcccgggcc

SEQ ID NO: 369 - RNA, 21 nt, Homo sapiens
cugaccuaugaauugacagcc

SEQ ID NO: 370 - RNA, 22 nt, Homo sapiens
cugccaauuccauaggucacag

SEQ ID NO: 371 - RNA, 22 nt, Homo sapiens
aacuggccuacaaagucccagu

SEQ ID NO: 372 - RNA, 22 nt, Homo sapiens
ugggucuuugcgggcgagauga

SEQ ID NO: 373 - RNA, 22 nt, Homo sapiens
aacuggcccucaaagucccgcu

SEQ ID NO: 374 - RNA, 22 nt, Homo sapiens
cgggguuuugagggcgagauga

SEQ ID NO: 375 - RNA, 22 nt, Homo sapiens
uguaacagcaacuccaugugga

SEQ ID NO: 376 - RNA, 22 nt, Homo sapiens
ccaguggggcugcuguuaucug

SEQ ID NO: 377 - RNA, 21 nt, Homo sapiens
uagcagcacagaaauauuggc

SEQ ID NO: 378 - RNA, 22 nt, Homo sapiens
ccaauauuggcugugcugcucc

SEQ ID NO: 379 - RNA, 22 nt, Homo sapiens
uagguaguuucauguuguuggg

SEQ ID NO: 380 - RNA, 22 nt, Homo sapiens
cggcaacaagaaacugccugag

SEQ ID NO: 381 - RNA, 22 nt, Homo sapiens
uagguaguuuccuguuguuggg

SEQ ID NO: 382 - RNA, 22 nt, Homo sapiens
uucaccaccuucuccacccagc

SEQ ID NO: 383 - RNA, 22 nt, Homo sapiens
gguccagaggggagauagguuc

SEQ ID NO: 384 - RNA, 23 nt, Homo sapiens
cccaguguucagacuaccuguuc

SEQ ID NO: 385 - RNA, 22 nt, Homo sapiens
acaguagucugcacauugguua

SEQ ID NO: 386 - RNA, 23 nt, Homo sapiens
cccaguguuuagacuaucuguuc

SEQ ID NO: 387 - RNA, 23 nt, Homo sapiens
ugugcaaaucuaugcaaaacuga

SEQ ID NO: 388 - RNA, 22 nt, Homo sapiens
aguuuugcauaguugcacuaca

SEQ ID NO: 389 - RNA, 23 nt, Homo sapiens
ugugcaaauccaugcaaaacuga

SEQ ID NO: 390 - RNA, 23 nt, Homo sapiens
aguuuugcagguuugcauccagc

SEQ ID NO: 391 - RNA, 22 nt, Homo sapiens
aguuuugcagguuugcauuuca

SEQ ID NO: 392 - RNA, 22 nt, Homo sapiens
uaacacugucugguaacgaugu

SEQ ID NO: 393 - RNA, 22 nt, Homo sapiens
caucuuaccggacagugcugga

SEQ ID NO: 394 - RNA, 22 nt, Homo sapiens
uaauacugccugguaaugauga

SEQ ID NO: 395 - RNA, 22 nt, Homo sapiens
caucuuacugggcagcauugga

SEQ ID NO: 396 - RNA, 23 nt, Homo sapiens
uaauacugccggguaaugaugga

SEQ ID NO: 397 - RNA, 22 nt, Homo sapiens
cgucuuacccagcaguguuugg

SEQ ID NO: 398 - RNA, 20 nt, Homo sapiens
agagguauagggcaugggaa

SEQ ID NO: 399 - RNA, 22 nt, Homo sapiens
uuccuaugcauauacuucuuug

SEQ ID NO: 400 - RNA, 22 nt, Homo sapiens
gugaaauguuuaggaccacuag

SEQ ID NO: 401 - RNA, 22 nt, Homo sapiens
uucccuuugucauccuaugccu

SEQ ID NO: 402 - RNA, 22 nt, Homo sapiens
uccuucauuccaccggagucug

SEQ ID NO: 403 - RNA, 22 nt, Homo sapiens
uggaauguaaggaagugugugg

SEQ ID NO: 404 - RNA, 22 nt, Homo sapiens
auaagacgagcaaaaagcuugu

SEQ ID NO: 405 - RNA, 22 nt, Homo sapiens
auaagacgaacaaaagguuugu

SEQ ID NO: 406 - RNA, 23 nt, Homo sapiens
uaaagugcuuauagugcagguag

SEQ ID NO: 407 - RNA, 22 nt, Homo sapiens
acugcauuaugagcacuuaaag

SEQ ID NO: 408 - RNA, 23 nt, Homo sapiens
caaagugcucauagugcagguag

SEQ ID NO: 409 - RNA, 22 nt, Homo sapiens
acuguaguaugggcacuuccag

SEQ ID NO: 410 - RNA, 22 nt, Homo sapiens
uagcuuaucagacugauguuga

SEQ ID NO: 411 - RNA, 21 nt, Homo sapiens
caacaccagucgaugggcugu

SEQ ID NO: 412 - RNA, 22 nt, Homo sapiens
cugugcgugugacagcggcuga

SEQ ID NO: 413 - RNA, 22 nt, Homo sapiens
uucccuuugucauccuucgccu

SEQ ID NO: 414 - RNA, 21 nt, Homo sapiens
uaacagucuccagucacggcc

SEQ ID NO: 415 - RNA, 22 nt, Homo sapiens
acagcaggcacagacaggcagu

SEQ ID NO: 416 - RNA, 22 nt, Homo sapiens
ugccugucuacacuugcugugc

SEQ ID NO: 417 - RNA, 21 nt, Homo sapiens
augaccuaugaauugacagac

SEQ ID NO: 418 - RNA, 22 nt, Homo sapiens
uaaucucagcuggcaacuguga

SEQ ID NO: 419 - RNA, 22 nt, Homo sapiens
aaaucucugcaggcaaauguga

SEQ ID NO: 420 - RNA, 23 nt, Homo sapiens
uacugcaucaggaacugauugga

SEQ ID NO: 421 - RNA, 21 nt, Homo sapiens
uugugcuugaucuaaccaugu

SEQ ID NO: 422 - RNA, 22 nt, Homo sapiens
augguuccgucaagcaccaugg

SEQ ID NO: 423 - RNA, 22 nt, Homo sapiens
caugguucugucaagcaccgcg

SEQ ID NO: 424 - RNA, 22 nt, Homo sapiens
agaguugagucuggacgucccg

SEQ ID NO: 425 - RNA, 22 nt, Homo sapiens
agaauuguggcuggacaucugu

SEQ ID NO: 426 - RNA, 21 nt, Homo sapiens
ugauuguccaaacgcaauucu

SEQ ID NO: 427 - RNA, 22 nt, Homo sapiens
aagcugccaguugaagaacugu

SEQ ID NO: 428 - RNA, 22 nt, Homo sapiens
aguucuucaguggcaagcuuua

SEQ ID NO: 429 - RNA, 21 nt, Homo sapiens
ccacaccguaucugacacuuu

SEQ ID NO: 430 - RNA, 21 nt, Homo sapiens
ccaccaccgugucugacacuu

SEQ ID NO: 431 - RNA, 22 nt, Homo sapiens
acacagggcuguugugaagacu

SEQ ID NO: 432 - RNA, 23 nt, Homo sapiens
agcuacauugucugcuggguuuc

SEQ ID NO: 433 - RNA, 22 nt, Homo sapiens
accuggcauacaauguagauuu

SEQ ID NO: 434 - RNA, 21 nt, Homo sapiens
agcuacaucuggcuacugggu

SEQ ID NO: 435 - RNA, 22 nt, Homo sapiens
cucaguagccaguguagauccu

SEQ ID NO: 436 - RNA, 22 nt, Homo sapiens
ugucaguuugucaaauacccca

SEQ ID NO: 437 - RNA, 22 nt, Homo sapiens
cguguauuugacaagcugaguu

SEQ ID NO: 438 - RNA, 21 nt, Homo sapiens
caagucacuagugguuccguu

SEQ ID NO: 439 - RNA, 21 nt, Homo sapiens
aucacauugccagggauuucc

SEQ ID NO: 440 - RNA, 22 nt, Homo sapiens
gggguuccuggggaugggauuu

SEQ ID NO: 441 - RNA, 21 nt, Homo sapiens
aucacauugccagggauuacc

SEQ ID NO: 442 - RNA, 22 nt, Homo sapiens
uggguuccuggcaugcugauuu

SEQ ID NO: 443 - RNA, 22 nt, Homo sapiens
uggcucaguucagcaggaacag

SEQ ID NO: 444 - RNA, 22 nt, Homo sapiens
ugccuacugagcugauaucagu

SEQ ID NO: 445 - RNA, 22 nt, Homo sapiens
ugccuacugagcugaaacacag

SEQ ID NO: 446 - RNA, 22 nt, Homo sapiens
cauugcacuugucucggucuga

SEQ ID NO: 447 - RNA, 21 nt, Homo sapiens
aggcggagacuugggcaauug

SEQ ID NO: 448 - RNA, 22 nt, Homo sapiens
uucaaguaauccaggauaggcu

SEQ ID NO: 449 - RNA, 22 nt, Homo sapiens
ccuauucuugguuacuugcacg

SEQ ID NO: 450 - RNA, 22 nt, Homo sapiens
ccuauucuugauuacuuguuuc

SEQ ID NO: 451 - RNA, 21 nt, Homo sapiens
uucaaguaauucaggauaggu

SEQ ID NO: 452 - RNA, 22 nt, Homo sapiens
ccuguucuccauuacuuggcuc

SEQ ID NO: 453 - RNA, 21 nt, Homo sapiens
uucacaguggcuaaguuccgc

SEQ ID NO: 454 - RNA, 22 nt, Homo sapiens
agggcuuagcugcuugugagca

SEQ ID NO: 455 - RNA, 21 nt, Homo sapiens
uucacaguggcuaaguucugc

SEQ ID NO: 456 - RNA, 22 nt, Homo sapiens
agagcuuagcugauuggugaac

SEQ ID NO: 457 - RNA, 22 nt, Homo sapiens
cacuagauugugagcuccugga

SEQ ID NO: 458 - RNA, 22 nt, Homo sapiens
aaggagcucacagucuauugag

SEQ ID NO: 459 - RNA, 22 nt, Homo sapiens
gaggguuggguggaggcucucc

SEQ ID NO: 460 - RNA, 21 nt, Homo sapiens
agggcccccccucaauccugu

SEQ ID NO: 461 - RNA, 21 nt, Homo sapiens
auguaugugugcaugugcaug

SEQ ID NO: 462 - RNA, 24 nt, Homo sapiens
agcagaagcagggagguucuccca

SEQ ID NO: 463 - RNA, 22 nt, Homo sapiens
uaugugggaugguaaaccgcuu

SEQ ID NO: 464 - RNA, 22 nt, Homo sapiens
ugguuuaccgucccacauacau

SEQ ID NO: 465 - RNA, 22 nt, Homo sapiens
uagcaccaucugaaaucgguua

SEQ ID NO: 466 - RNA, 22 nt, Homo sapiens
acugauuucuuuugguguucag

SEQ ID NO: 467 - RNA, 23 nt, Homo sapiens
uagcaccauuugaaaucaguguu

SEQ ID NO: 468 - RNA, 24 nt, Homo sapiens
gcugguuucauauggugguuuaga

SEQ ID NO: 469 - RNA, 22 nt, Homo sapiens
cugguuucacaugguggcuuag

SEQ ID NO: 470 - RNA, 22 nt, Homo sapiens
uagcaccauuugaaaucgguua

SEQ ID NO: 471 - RNA, 22 nt, Homo sapiens
ugaccgauuucuccugguguuc

SEQ ID NO: 472 - RNA, 22 nt, Homo sapiens
uauacaagggcagacucucucu

SEQ ID NO: 473 - RNA, 23 nt, Homo sapiens
cagugcaauaguauugucaaagc

SEQ ID NO: 474 - RNA, 23 nt, Homo sapiens
cagugcaaugauauugucaaagc

SEQ ID NO: 475 - RNA, 23 nt, Homo sapiens
uaagugcuuccauguuuugguga

SEQ ID NO: 476 - RNA, 23 nt, Homo sapiens
acuuaaacguggauguacuugcu

SEQ ID NO: 477 - RNA, 23 nt, Homo sapiens
uaagugcuuccauguuuuaguag

SEQ ID NO: 478 - RNA, 22 nt, Homo sapiens
acuuuaacauggaagugcuuuc

SEQ ID NO: 479 - RNA, 23 nt, Homo sapiens
uaagugcuuccauguuucagugg

SEQ ID NO: 480 - RNA, 22 nt, Homo sapiens
uuuaacauggggguaccugcug

SEQ ID NO: 481 - RNA, 23 nt, Homo sapiens
uaagugcuuccauguuugagugu

SEQ ID NO: 482 - RNA, 22 nt, Homo sapiens
acuuuaacauggaggcacuugc

SEQ ID NO: 483 - RNA, 17 nt, Homo sapiens
uaagugcuuccaugcuu

SEQ ID NO: 484 - RNA, 17 nt, Homo sapiens
uaauugcuuccauguuu

SEQ ID NO: 485 - RNA, 22 nt, Homo sapiens
uguaaacauccucgacuggaag

SEQ ID NO: 486 - RNA, 22 nt, Homo sapiens
cuuucagucggauguuugcagc

SEQ ID NO: 487 - RNA, 22 nt, Homo sapiens
uguaaacauccuacacucagcu

SEQ ID NO: 488 - RNA, 22 nt, Homo sapiens
cugggagguggauguuuacuuc

SEQ ID NO: 489 - RNA, 23 nt, Homo sapiens
uguaaacauccuacacucucagc

SEQ ID NO: 490 - RNA, 22 nt, Homo sapiens
cugggagaggguuguuuacucc

SEQ ID NO: 491 - RNA, 22 nt, Homo sapiens
cugggagaaggcuguuuacucu

SEQ ID NO: 492 - RNA, 22 nt, Homo sapiens
uguaaacauccccgacuggaag

SEQ ID NO: 493 - RNA, 22 nt, Homo sapiens
cuuucagucagauguuugcugc

SEQ ID NO: 494 - RNA, 22 nt, Homo sapiens
uguaaacauccuugacuggaag

SEQ ID NO: 495 - RNA, 22 nt, Homo sapiens
cuuucagucggauguuuacagc

SEQ ID NO: 496 - RNA, 21 nt, Homo sapiens
aggcaagaugcuggcauagcu

SEQ ID NO: 497 - RNA, 22 nt, Homo sapiens
ugcuaugccaacauauugccau

SEQ ID NO: 498 - RNA, 22 nt, Homo sapiens
uauugcacauuacuaaguugca

SEQ ID NO: 499 - RNA, 22 nt, Homo sapiens
caauuuagugugugugauauuu

SEQ ID NO: 500 - RNA, 22 nt, Homo sapiens
aaaagcuggguugagagggcga

SEQ ID NO: 501 - RNA, 22 nt, Homo sapiens
aaaagcuggguugagagggcaa

SEQ ID NO: 502 - RNA, 20 nt, Homo sapiens
aaaagcuggguugagagggu

SEQ ID NO: 503 - RNA, 19 nt, Homo sapiens
aaaagcuggguugagagga

SEQ ID NO: 504 - RNA, 21 nt, Homo sapiens
cacauuacacggucgaccucu

SEQ ID NO: 505 - RNA, 22 nt, Homo sapiens
aggugguccguggcgcguucgc

SEQ ID NO: 506 - RNA, 20 nt, Homo sapiens
acugccccaggugcugcugg

SEQ ID NO: 507 - RNA, 23 nt, Homo sapiens
cgcauccccuagggcauuggugu

SEQ ID NO: 508 - RNA, 23 nt, Homo sapiens
ccuaguagguguccaguaagugu

SEQ ID NO: 509 - RNA, 20 nt, Homo sapiens
ccucugggcccuuccuccag

SEQ ID NO: 510 - RNA, 22 nt, Homo sapiens
cuggcccucucugcccuuccgu

SEQ ID NO: 511 - RNA, 22 nt, Homo sapiens
aacacaccugguuaaccucuuu

SEQ ID NO: 512 - RNA, 23 nt, Homo sapiens
gcaaagcacacggccugcagaga

SEQ ID NO: 513 - RNA, 22 nt, Homo sapiens
ucucugggccugugucuuaggc

SEQ ID NO: 514 - RNA, 21 nt, Homo sapiens
gccccugggccuauccuagaa

SEQ ID NO: 515 - RNA, 22 nt, Homo sapiens
cuagguauggucccagggaucc

SEQ ID NO: 516 - RNA, 23 nt, Homo sapiens
ucaagagcaauaacgaaaaaugu

SEQ ID NO: 517 - RNA, 22 nt, Homo sapiens
uuuuucauuauugcuccugacc

SEQ ID NO: 518 - RNA, 22 nt, Homo sapiens
cuccuauaugaugccuuucuuc

SEQ ID NO: 519 - RNA, 21 nt, Homo sapiens
gaacggcuucauacaggaguu

SEQ ID NO: 520 - RNA, 22 nt, Homo sapiens
uccagcaucagugauuuuguug

SEQ ID NO: 521 - RNA, 22 nt, Homo sapiens
aacaauauccuggugcugagug

SEQ ID NO: 522 - RNA, 23 nt, Homo sapiens
ugagcgccucgacgacagagccg

SEQ ID NO: 523 - RNA, 23 nt, Homo sapiens
ucccuguccuccaggagcucacg

SEQ ID NO: 524 - RNA, 21 nt, Homo sapiens
gugcauuguaguugcauugca

SEQ ID NO: 525 - RNA, 22 nt, Homo sapiens
caauguuuccacagugcaucac

SEQ ID NO: 526 - RNA, 20 nt, Homo sapiens
gugcauugcuguugcauugc

SEQ ID NO: 527 - RNA, 22 nt, Homo sapiens
cagugccucggcagugcagccc

SEQ ID NO: 528 - RNA, 22 nt, Homo sapiens
uuauaaagcaaugagacugauu

SEQ ID NO: 529 - RNA, 22 nt, Homo sapiens
uccgucucaguuacuuuauagc

SEQ ID NO: 530 - RNA, 23 nt, Homo sapiens
ucucacacagaaaucgcacccgu

SEQ ID NO: 531 - RNA, 21 nt, Homo sapiens
aggggugcuaucugugauuga

SEQ ID NO: 532 - RNA, 22 nt, Homo sapiens
gcugacuccuaguccagggcuc

SEQ ID NO: 533 - RNA, 23 nt, Homo sapiens
ugucugcccgcaugccugccucu

SEQ ID NO: 534 - RNA, 22 nt, Homo sapiens
uggcagugucuuagcugguugu

SEQ ID NO: 535 - RNA, 22 nt, Homo sapiens
caaucagcaaguauacugcccu

SEQ ID NO: 536 - RNA, 22 nt, Homo sapiens
caaucacuaacuccacugccau

SEQ ID NO: 537 - RNA, 23 nt, Homo sapiens
uaggcagugucauuagcugauug

SEQ ID NO: 538 - RNA, 22 nt, Homo sapiens
aaucacuaaccacacggccagg

SEQ ID NO: 539 - RNA, 23 nt, Homo sapiens
aggcaguguaguuagcugauugc

SEQ ID NO: 540 - RNA, 23 nt, Homo sapiens
ucccccaggugugauucugauuu

SEQ ID NO: 541 - RNA, 22 nt, Homo sapiens
uuaucagaaucuccagggguac

SEQ ID NO: 542 - RNA, 22 nt, Homo sapiens
aacacaccuauucaaggauuca

SEQ ID NO: 543 - RNA, 24 nt, Homo sapiens
aauccuuggaaccuaggugugagu

SEQ ID NO: 544 - RNA, 22 nt, Homo sapiens
aauugcacgguauccaucugua

SEQ ID NO: 545 - RNA, 22 nt, Homo sapiens
cggguggaucacgaugcaauuu

SEQ ID NO: 546 - RNA, 22 nt, Homo sapiens
uaaugccccuaaaaauccuuau

SEQ ID NO: 547 - RNA, 22 nt, Homo sapiens
aauugcacuuuagcaaugguga

SEQ ID NO: 548 - RNA, 22 nt, Homo sapiens
acuguugcuaauaugcaacucu

SEQ ID NO: 549 - RNA, 21 nt, Homo sapiens
aauaauacaugguugaucuuu

SEQ ID NO: 550 - RNA, 22 nt, Homo sapiens
agaucgaccguguuauauucgc

SEQ ID NO: 551 - RNA, 22 nt, Homo sapiens
gccugcugggguggaaccuggu

SEQ ID NO: 552 - RNA, 23 nt, Homo sapiens
aagugccgccaucuuuugagugu

SEQ ID NO: 553 - RNA, 20 nt, Homo sapiens
acucaaacugugggggcacu

SEQ ID NO: 554 - RNA, 23 nt, Homo sapiens
aaagugcugcgacauuugagcgu

SEQ ID NO: 555 - RNA, 23 nt, Homo sapiens
gaagugcuucgauuuuggggugu

SEQ ID NO: 556 - RNA, 22 nt, Homo sapiens
acucaaaaugggggcgcuuucc

SEQ ID NO: 557 - RNA, 22 nt, Homo sapiens
uuauaauacaaccugauaagug

SEQ ID NO: 558 - RNA, 22 nt, Homo sapiens
cuuaucagauuguauuguaauu

SEQ ID NO: 559 - RNA, 22 nt, Homo sapiens
auauaauacaaccugcuaagug

SEQ ID NO: 560 - RNA, 22 nt, Homo sapiens
cuuagcagguuguauuaucauu

SEQ ID NO: 561 - RNA, 22 nt, Homo sapiens
uuuguucguucggcucgcguga

SEQ ID NO: 562 - RNA, 21 nt, Homo sapiens
aucauagaggaaaauccacgu

SEQ ID NO: 563 - RNA, 22 nt, Homo sapiens
guagauucuccuucuaugagua

SEQ ID NO: 564 - RNA, 22 nt, Homo sapiens
aucauagaggaaaauccauguu

SEQ ID NO: 565 - RNA, 21 nt, Homo sapiens
aacauagaggaaauuccacgu

SEQ ID NO: 566 - RNA, 22 nt, Homo sapiens
aucacacaaaggcaacuuuugu

SEQ ID NO: 567 - RNA, 22 nt, Homo sapiens
agagguugcccuuggugaauuc

SEQ ID NO: 568 - RNA, 21 nt, Homo sapiens
acuggacuuggagucagaagg

SEQ ID NO: 569 - RNA, 22 nt, Homo sapiens
cuccugacuccagguccugugu

SEQ ID NO: 570 - RNA, 21 nt, Homo sapiens
ugguagacuauggaacguagg

SEQ ID NO: 571 - RNA, 22 nt, Homo sapiens
uauguaacaugguccacuaacu

SEQ ID NO: 572 - RNA, 22 nt, Homo sapiens
uauguaauaugguccacaucuu

SEQ ID NO: 573 - RNA, 22 nt, Homo sapiens
ugguugaccauagaacaugcgc

SEQ ID NO: 574 - RNA, 22 nt, Homo sapiens
uauacaagggcaagcucucugu

SEQ ID NO: 575 - RNA, 22 nt, Homo sapiens
gaaguuguucgugguggauucg

SEQ ID NO: 576 - RNA, 22 nt, Homo sapiens
agaucagaaggugauuguggcu

SEQ ID NO: 577 - RNA, 20 nt, Homo sapiens
auuccuagaaauuguucaua

SEQ ID NO: 578 - RNA, 22 nt, Homo sapiens
gaauguugcucggugaaccccu

SEQ ID NO: 579 - RNA, 23 nt, Homo sapiens
agguuacccgagcaacuuugcau

SEQ ID NO: 580 - RNA, 21 nt, Homo sapiens
aauauaacacagauggccugu

SEQ ID NO: 581 - RNA, 21 nt, Homo sapiens
uaguagaccguauagcguacg

SEQ ID NO: 582 - RNA, 22 nt, Homo sapiens
uauguaacacgguccacuaacc

SEQ ID NO: 583 - RNA, 23 nt, Homo sapiens
acuucaccugguccacuagccgu

SEQ ID NO: 584 - RNA, 23 nt, Homo sapiens
aucaacagacauuaauugggcgc

SEQ ID NO: 585 - RNA, 22 nt, Homo sapiens
acuggacuuagggucagaaggc

SEQ ID NO: 586 - RNA, 23 nt, Homo sapiens
agcucggucugaggccccucagu

SEQ ID NO: 587 - RNA, 23 nt, Homo sapiens
ugaggggcagagagcgagacuuu

SEQ ID NO: 588 - RNA, 22 nt, Homo sapiens
cagcagcaauucauguuuugaa

SEQ ID NO: 589 - RNA, 21 nt, Homo sapiens
caaaacgugaggcgcugcuau

SEQ ID NO: 590 - RNA, 23 nt, Homo sapiens
aaugacacgaucacucccguuga

SEQ ID NO: 591 - RNA, 22 nt, Homo sapiens
aucgggaaugucguguccgccc

SEQ ID NO: 592 - RNA, 22 nt, Homo sapiens
uaauacugucugguaaaaccgu

SEQ ID NO: 593 - RNA, 21 nt, Homo sapiens
ugucuugcaggccgucaugca

SEQ ID NO: 594 - RNA, 22 nt, Homo sapiens
caggucgucuugcagggcuucu

SEQ ID NO: 595 - RNA, 23 nt, Homo sapiens
ucuuggaguaggucauugggugg

SEQ ID NO: 596 - RNA, 21 nt, Homo sapiens
cuggauggcuccuccaugucu

SEQ ID NO: 597 - RNA, 22 nt, Homo sapiens
aucaugaugggcuccucggugu

SEQ ID NO: 598 - RNA, 22 nt, Homo sapiens
uugcauauguaggaugucccau

SEQ ID NO: 599 - RNA, 22 nt, Homo sapiens
uggcaguguauuguuagcuggu

SEQ ID NO: 600 - RNA, 22 nt, Homo sapiens
aggcaguguauuguuagcuggc

SEQ ID NO: 601 - RNA, 22 nt, Homo sapiens
uuuugcgauguguuccuaauau

SEQ ID NO: 602 - RNA, 22 nt, Homo sapiens
uugggaucauuuugcauccaua

SEQ ID NO: 603 - RNA, 22 nt, Homo sapiens
uuuugcaauauguuccugaaua

SEQ ID NO: 604 - RNA, 22 nt, Homo sapiens
aaaccguuaccauuacugaguu

SEQ ID NO: 605 - RNA, 22 nt, Homo sapiens
aacuguuugcagaggaaacuga

SEQ ID NO: 606 - RNA, 22 nt, Homo sapiens
cucaucugcaaagaaguaagug

SEQ ID NO: 607 - RNA, 23 nt, Homo sapiens
agguuguccguggugaguucgca

SEQ ID NO: 608 - RNA, 23 nt, Homo sapiens
uagugcaauauugcuuauagggu

SEQ ID NO: 609 - RNA, 22 nt, Homo sapiens
acccuaucaauauugucucugc

SEQ ID NO: 610 - RNA, 21 nt, Homo sapiens
gcaguccaugggcauauacac

SEQ ID NO: 611 - RNA, 22 nt, Homo sapiens
uaugugccuuuggacuacaucg

SEQ ID NO: 612 - RNA, 21 nt, Homo sapiens
ucacuccucuccucccgucuu

SEQ ID NO: 613 - RNA, 22 nt, Homo sapiens
aagacgggaggaaagaagggag

SEQ ID NO: 614 - RNA, 22 nt, Homo sapiens
ucaggcucaguccccucccgau

SEQ ID NO: 615 - RNA, 22 nt, Homo sapiens
gucauacacggcucuccucucu

SEQ ID NO: 616 - RNA, 22 nt, Homo sapiens
agaggcuggccgugaugaauuc

SEQ ID NO: 617 - RNA, 21 nt, Homo sapiens
cggggcagcucaguacaggau

SEQ ID NO: 618 - RNA, 22 nt, Homo sapiens
uccuguacugagcugccccgag

SEQ ID NO: 619 - RNA, 22 nt, Homo sapiens
aaucauacagggacauccaguu

SEQ ID NO: 620 - RNA, 22 nt, Homo sapiens
aaucguacagggucauccacuu

SEQ ID NO: 621 - RNA, 21 nt, Homo sapiens
uugaaaggcuauuucuugguc

SEQ ID NO: 622 - RNA, 21 nt, Homo sapiens
cccagauaauggcacucucaa

SEQ ID NO: 623 - RNA, 22 nt, Homo sapiens
gugacaucacauauacggcagc

SEQ ID NO: 624 - RNA, 22 nt, Homo sapiens
caaccuggaggacuccaugcug

SEQ ID NO: 625 - RNA, 20 nt, Homo sapiens
ccauggaucuccaggugggu

SEQ ID NO: 626 - RNA, 22 nt, Homo sapiens
cuuaugcaagauucccuucuac

SEQ ID NO: 627 - RNA, 22 nt, Homo sapiens
aguggggaacccuuccaugagg

SEQ ID NO: 628 - RNA, 23 nt, Homo sapiens
aggaccugcgggacaagauucuu

SEQ ID NO: 629 - RNA, 22 nt, Homo sapiens
ugaaggucuacugugugccagg

SEQ ID NO: 630 - RNA, 22 nt, Homo sapiens
uuguacaugguaggcuuucauu

SEQ ID NO: 631 - RNA, 22 nt, Homo sapiens
ugaaacauacacgggaaaccuc

SEQ ID NO: 632 - RNA, 22 nt, Homo sapiens
aaacaaacauggugcacuucuu

SEQ ID NO: 633 - RNA, 22 nt, Homo sapiens
ugaguauuacauggccaaucuc

SEQ ID NO: 634 - RNA, 21 nt, Homo sapiens
cagcagcacacugugguuugu

SEQ ID NO: 635 - RNA, 22 nt, Homo sapiens
caaaccacacugugguguuaga

SEQ ID NO: 636 - RNA, 23 nt, Homo sapiens
uuucaagccagggggcguuuuuc

SEQ ID NO: 637 - RNA, 22 nt, Homo sapiens
aacaucacagcaagucugugcu

SEQ ID NO: 638 - RNA, 21 nt, Homo sapiens
uuaagacuugcagugauguuu

SEQ ID NO: 639 - RNA, 23 nt, Homo sapiens
uaauccuugcuaccugggugaga

SEQ ID NO: 640 - RNA, 22 nt, Homo sapiens
augcaccugggcaaggauucug

SEQ ID NO: 641 - RNA, 22 nt, Homo sapiens
aaugcacccgggcaaggauucu

SEQ ID NO: 642 - RNA, 22 nt, Homo sapiens
aauccuuugucccugggugaga

SEQ ID NO: 643 - RNA, 22 nt, Homo sapiens
aaugcaccugggcaaggauuca

SEQ ID NO: 644 - RNA, 21 nt, Homo sapiens
auccuugcuaucugggugcua

SEQ ID NO: 645 - RNA, 23 nt, Homo sapiens
uagcagcgggaacaguucugcag

SEQ ID NO: 646 - RNA, 22 nt, Homo sapiens
agacccuggucugcacucuauc

SEQ ID NO: 647 - RNA, 22 nt, Homo sapiens
cgucaacacuugcugguuuccu

SEQ ID NO: 648 - RNA, 22 nt, Homo sapiens
gggagccaggaaguauugaugu

SEQ ID NO: 649 - RNA, 21 nt, Homo sapiens
uaaggcacccuucugaguaga

SEQ ID NO: 650 - RNA, 21 nt, Homo sapiens
uuuugcaccuuuuggagugaa

SEQ ID NO: 651 - RNA, 23 nt, Homo sapiens
ugauuguagccuuuuggaguaga

SEQ ID NO: 652 - RNA, 23 nt, Homo sapiens
uacuccagagggcgucacucaug

SEQ ID NO: 653 - RNA, 22 nt, Homo sapiens
uacugcagacguggcaaucaug

SEQ ID NO: 654 - RNA, 22 nt, Homo sapiens
ugauugguacgucuguggguag

SEQ ID NO: 655 - RNA, 21 nt, Homo sapiens
uacugcagacaguggcaauca

SEQ ID NO: 656 - RNA, 22 nt, Homo sapiens
uacucaggagaguggcaaucac

SEQ ID NO: 657 - RNA, 21 nt, Homo sapiens
gugucuuuugcucugcaguca

SEQ ID NO: 658 - RNA, 22 nt, Homo sapiens
aagugcugucauagcugagguc

SEQ ID NO: 659 - RNA, 23 nt, Homo sapiens
cacucagccuugagggcacuuuc

SEQ ID NO: 660 - RNA, 23 nt, Homo sapiens
uaaauuucaccuuucugagaagg

SEQ ID NO: 661 - RNA, 18 nt, Homo sapiens
uucacagggaggugucau

SEQ ID NO: 662 - RNA, 22 nt, Homo sapiens
uucacaaggaggugucauuuau

SEQ ID NO: 663 - RNA, 22 nt, Homo sapiens
uucucaaggaggugucguuuau

SEQ ID NO: 664 - RNA, 21 nt, Homo sapiens
auugacacuucugugaguaga

SEQ ID NO: 665 - RNA, 22 nt, Homo sapiens
gagugccuucuuuuggagcguu

SEQ ID NO: 666 - RNA, 24 nt, Homo sapiens
uucuccaaaagaaagcacuuucug

SEQ ID NO: 667 - RNA, 18 nt, Homo sapiens
ugcuuccuuucagagggu

SEQ ID NO: 668 - RNA, 23 nt, Homo sapiens
uucucgaggaaagaagcacuuuc

SEQ ID NO: 669 - RNA, 22 nt, Homo sapiens
aucuggagguaagaagcacuuu

SEQ ID NO: 670 - RNA, 22 nt, Homo sapiens
ccucuagauggaagcacugucu

SEQ ID NO: 671 - RNA, 22 nt, Homo sapiens
aucgugcaucccuuuagagugu

SEQ ID NO: 672 - RNA, 22 nt, Homo sapiens
ucgugcaucccuuuagaguguu

SEQ ID NO: 673 - RNA, 22 nt, Homo sapiens
aucgugcauccuuuuagagugu

SEQ ID NO: 674 - RNA, 22 nt, Homo sapiens
gaaagcgcuucccuuugcugga

SEQ ID NO: 675 - RNA, 22 nt, Homo sapiens
caaagcgcuccccuuuagaggu

SEQ ID NO: 676 - RNA, 23 nt, Homo sapiens
caaagcgcuucucuuuagagugu

SEQ ID NO: 677 - RNA, 23 nt, Homo sapiens
ucucuggagggaagcacuuucug

SEQ ID NO: 678 - RNA, 21 nt, Homo sapiens
caaagcgcuucccuuuggagc

SEQ ID NO: 679 - RNA, 22 nt, Homo sapiens
cucuagagggaagcacuuucug

SEQ ID NO: 680 - RNA, 21 nt, Homo sapiens
aaagcgcuucccuucagagug

SEQ ID NO: 681 - RNA, 21 nt, Homo sapiens
gaaagcgcuucucuuuagagg

SEQ ID NO: 682 - RNA, 22 nt, Homo sapiens
cucuagagggaagcacuuucuc

SEQ ID NO: 683 - RNA, 22 nt, Homo sapiens
aaagugcauccuuuuagagugu

SEQ ID NO: 684 - RNA, 22 nt, Homo sapiens
cucuagagggaagcgcuuucug

SEQ ID NO: 685 - RNA, 22 nt, Homo sapiens
aaagugcauccuuuuagagguu

SEQ ID NO: 686 - RNA, 22 nt, Homo sapiens
aaagugcaucuuuuuagaggau

SEQ ID NO: 687 - RNA, 22 nt, Homo sapiens
caaagugccucccuuuagagug

SEQ ID NO: 688 - RNA, 22 nt, Homo sapiens
aagugccuccuuuuagaguguu

SEQ ID NO: 689 - RNA, 22 nt, Homo sapiens
uucuccaaaagggagcacuuuc

SEQ ID NO: 690 - RNA, 22 nt, Homo sapiens
aaagugcuucccuuuggacugu

SEQ ID NO: 691 - RNA, 21 nt, Homo sapiens
cuccagagggaaguacuuucu

SEQ ID NO: 692 - RNA, 21 nt, Homo sapiens
aaagugcuuccuuuuagaggg

SEQ ID NO: 693 - RNA, 22 nt, Homo sapiens
aaagugcuuccuuuuagagggu

SEQ ID NO: 694 - RNA, 22 nt, Homo sapiens
aaagugcuucucuuuggugggu

SEQ ID NO: 695 - RNA, 20 nt, Homo sapiens
cuacaaagggaagcccuuuc

SEQ ID NO: 696 - RNA, 21 nt, Homo sapiens
aaagugcuuccuuuuugaggg

SEQ ID NO: 697 - RNA, 22 nt, Homo sapiens
aagugcuuccuuuuagaggguu

SEQ ID NO: 698 - RNA, 24 nt, Homo sapiens
acaaagugcuucccuuuagagugu

SEQ ID NO: 699 - RNA, 22 nt, Homo sapiens
acaaagugcuucccuuuagagu

SEQ ID NO: 700 - RNA, 22 nt, Homo sapiens
aacgcacuucccuuuagagugu

SEQ ID NO: 701 - RNA, 22 nt, Homo sapiens
aaaaugguucccuuuagagugu

SEQ ID NO: 702 - RNA, 23 nt, Homo sapiens
gaacgcgcuucccuauagagggu

SEQ ID NO: 703 - RNA, 21 nt, Homo sapiens
gaaggcgcuucccuuuggagu

SEQ ID NO: 704 - RNA, 22 nt, Homo sapiens
cuacaaagggaagcacuuucuc

SEQ ID NO: 705 - RNA, 22 nt, Homo sapiens
gaaggcgcuucccuuuagagcg

SEQ ID NO: 706 - RNA, 21 nt, Homo sapiens
cuccagagggaugcacuuucu

SEQ ID NO: 707 - RNA, 23 nt, Homo sapiens
cucuugagggaagcacuuucugu

SEQ ID NO: 708 - RNA, 22 nt, Homo sapiens
gaaagugcuuccuuuuagaggc

SEQ ID NO: 709 - RNA, 20 nt, Homo sapiens
cugcaaagggaagcccuuuc

SEQ ID NO: 710 - RNA, 22 nt, Homo sapiens
ccucccacacccaaggcuugca

SEQ ID NO: 711 - RNA, 22 nt, Homo sapiens
caugccuugaguguaggaccgu

SEQ ID NO: 712 - RNA, 22 nt, Homo sapiens
ggagaaauuauccuuggugugu

SEQ ID NO: 713 - RNA, 22 nt, Homo sapiens
uggugggcacagaaucuggacu

SEQ ID NO: 714 - RNA, 25 nt, Homo sapiens
aaaggauucugcugucggucccacu

SEQ ID NO: 715 - RNA, 22 nt, Homo sapiens
ugugacagauugauaacugaaa

SEQ ID NO: 716 - RNA, 23 nt, Homo sapiens
ucggggaucaucaugucacgaga

SEQ ID NO: 717 - RNA, 22 nt, Homo sapiens
aaacauucgcggugcacuucuu

SEQ ID NO: 718 - RNA, 22 nt, Homo sapiens
auucugcauuuuuagcaaguuc

SEQ ID NO: 719 - RNA, 22 nt, Homo sapiens
ucagcaaacauuuauugugugc

SEQ ID NO: 720 - RNA, 22 nt, Homo sapiens
ucaguaaauguuuauuagauga

SEQ ID NO: 721 - RNA, 22 nt, Homo sapiens
caaaacuggcaauuacuuuugc

SEQ ID NO: 722 - RNA, 22 nt, Homo sapiens
aaaaguaauugcgaguuuuacc

SEQ ID NO: 723 - RNA, 22 nt, Homo sapiens
caagaaccucaguugcuuuugu

SEQ ID NO: 724 - RNA, 22 nt, Homo sapiens
aaaaguaauugugguuuuggcc

SEQ ID NO: 725 - RNA, 22 nt, Homo sapiens
caaaaaucucaauuacuuuugc

SEQ ID NO: 726 - RNA, 22 nt, Homo sapiens
aaaaguaauugcgguuuuugcc

SEQ ID NO: 727 - RNA, 22 nt, Homo sapiens
caaaaaccacaguuucuuuugc

SEQ ID NO: 728 - RNA, 22 nt, Homo sapiens
aaaaguaauugugguuuuugcc

SEQ ID NO: 729 - RNA, 22 nt, Homo sapiens
aaaaacugagacuacuuuugca

SEQ ID NO: 730 - RNA, 19 nt, Homo sapiens
aaaaacuguaauuacuuuu

SEQ ID NO: 731 - RNA, 22 nt, Homo sapiens
aaaacuguaauuacuuuuguac

SEQ ID NO: 732 - RNA, 22 nt, Homo sapiens
aaaaguaaucgcgguuuuuguc

SEQ ID NO: 733 - RNA, 22 nt, Homo sapiens
aaaaguaauugcggauuuugcc

SEQ ID NO: 734 - RNA, 22 nt, Homo sapiens
aaaaguaauugcggucuuuggu

SEQ ID NO: 735 - RNA, 22 nt, Homo sapiens
aaaaguacuugcggauuuugcu

SEQ ID NO: 736 - RNA, 22 nt, Homo sapiens
aaaaguauuugcggguuuuguc

SEQ ID NO: 737 - RNA, 21 nt, Homo sapiens
caaagguauuugugguuuuug

SEQ ID NO: 738 - RNA, 22 nt, Homo sapiens
caaaaguaauuguggauuuugu

SEQ ID NO: 739 - RNA, 22 nt, Homo sapiens
ccaaaacugcaguuacuuuugc

SEQ ID NO: 740 - RNA, 22 nt, Homo sapiens
uagcaaaaacugcaguuacuuu

SEQ ID NO: 741 - RNA, 21 nt, Homo sapiens
ugacaacuauggaugagcucu

SEQ ID NO: 742 - RNA, 23 nt, Homo sapiens
agugccugagggaguaagagccc

SEQ ID NO: 743 - RNA, 22 nt, Homo sapiens
ugucuuacucccucaggcacau

SEQ ID NO: 744 - RNA, 21 nt, Homo sapiens
gcgacccacucuugguuucca

SEQ ID NO: 745 - RNA, 21 nt, Homo sapiens
gcgacccauacuugguuucag

SEQ ID NO: 746 - RNA, 22 nt, Homo sapiens
gaaaucaagcgugggugagacc

SEQ ID NO: 747 - RNA, 21 nt, Homo sapiens
aacaggugacugguuagacaa

SEQ ID NO: 748 - RNA, 21 nt, Homo sapiens
aaaacggugagauuuuguuuu

SEQ ID NO: 749 - RNA, 21 nt, Homo sapiens
gcuaguccugacucagccagu

SEQ ID NO: 750 - RNA, 21 nt, Homo sapiens
aggguaagcugaaccucugau

SEQ ID NO: 751 - RNA, 22 nt, Homo sapiens
auauuaccauuagcucaucuuu

SEQ ID NO: 752 - RNA, 22 nt, Homo sapiens
gaugagcucauuguaauaugag

SEQ ID NO: 753 - RNA, 23 nt, Homo sapiens
guuugcacgggugggccuugucu

SEQ ID NO: 754 - RNA, 19 nt, Homo sapiens
ugagcugcuguaccaaaau

SEQ ID NO: 755 - RNA, 21 nt, Homo sapiens
uaaaguaaauaugcaccaaaa

SEQ ID NO: 756 - RNA, 22 nt, Homo sapiens
caaaguuuaagauccuugaagu

SEQ ID NO: 757 - RNA, 20 nt, Homo sapiens
aaaguagcuguaccauuugc

SEQ ID NO: 758 - RNA, 19 nt, Homo sapiens
agguugacauacguuuccc

SEQ ID NO: 759 - RNA, 19 nt, Homo sapiens
aggcacggugucagcaggc

SEQ ID NO: 760 - RNA, 19 nt, Homo sapiens
gggcgccugugaucccaac

SEQ ID NO: 761 - RNA, 23 nt, Homo sapiens
aguauguucuuccaggacagaac

SEQ ID NO: 762 - RNA, 20 nt, Homo sapiens
auguauaaauguauacacac

SEQ ID NO: 763 - RNA, 21 nt, Homo sapiens
aguuaaugaauccuggaaagu

SEQ ID NO: 764 - RNA, 22 nt, Homo sapiens
cgaaaacagcaauuaccuuugc

SEQ ID NO: 765 - RNA, 21 nt, Homo sapiens
ugaguuggccaucugagugag

SEQ ID NO: 766 - RNA, 20 nt, Homo sapiens
guccgcucggcgguggccca

SEQ ID NO: 767 - RNA, 24 nt, Homo sapiens
cugaagugauguguaacugaucag

SEQ ID NO: 768 - RNA, 22 nt, Homo sapiens
cacgcucaugcacacacccaca

SEQ ID NO: 769 - RNA, 23 nt, Homo sapiens
ugagugugugugugugagugugu

SEQ ID NO: 770 - RNA, 19 nt, Homo sapiens
gagccaguuggacaggagc

SEQ ID NO: 771 - RNA, 22 nt, Homo sapiens
aagauguggaaaaauuggaauc

SEQ ID NO: 772 - RNA, 22 nt, Homo sapiens
auucuaauuucuccacgucuuu

SEQ ID NO: 773 - RNA, 21 nt, Homo sapiens
uagauaaaauauugguaccug

SEQ ID NO: 774 - RNA, 21 nt, Homo sapiens
cuucuugugcucuaggauugu

SEQ ID NO: 775 - RNA, 23 nt, Homo sapiens
uucauuugguauaaaccgcgauu

SEQ ID NO: 776 - RNA, 22 nt, Homo sapiens
uugagaaugaugaaucauuagg

SEQ ID NO: 777 - RNA, 21 nt, Homo sapiens
ucuuguguucucuagaucagu

SEQ ID NO: 778 - RNA, 22 nt, Homo sapiens
uaacugguugaacaacugaacc

SEQ ID NO: 779 - RNA, 23 nt, Homo sapiens
uuacaguuguucaaccaguuacu

SEQ ID NO: 780 - RNA, 21 nt, Homo sapiens
caaagaggaaggucccauuac

SEQ ID NO: 781 - RNA, 22 nt, Homo sapiens
uuaugguuugccugggacugag

SEQ ID NO: 782 - RNA, 19 nt, Homo sapiens
ugggcguaucuguaugcua

SEQ ID NO: 783 - RNA, 22 nt, Homo sapiens
uaugcauuguauuuuuaggucc

SEQ ID NO: 784 - RNA, 21 nt, Homo sapiens
uuuccauaggugaugagucac

SEQ ID NO: 785 - RNA, 21 nt, Homo sapiens
uuggccacaauggguuagaac

SEQ ID NO: 786 - RNA, 22 nt, Homo sapiens
ugagaaccacgucugcucugag

SEQ ID NO: 787 - RNA, 24 nt, Homo sapiens
ucagaacaaaugccgguucccaga

SEQ ID NO: 788 - RNA, 21 nt, Homo sapiens
uaauuuuauguauaagcuagu

SEQ ID NO: 789 - RNA, 22 nt, Homo sapiens
gagcuuauucauaaaagugcag

SEQ ID NO: 790 - RNA, 20 nt, Homo sapiens
agaccauggguucucauugu

SEQ ID NO: 791 - RNA, 22 nt, Homo sapiens
uugugucaauaugcgaugaugu

SEQ ID NO: 792 - RNA, 19 nt, Homo sapiens
ugucucugcugggguuucu

SEQ ID NO: 793 - RNA, 25 nt, Homo sapiens
aggcaccagccaggcauugcucagc

SEQ ID NO: 794 - RNA, 21 nt, Homo sapiens
gaagugugccguggugugucu

SEQ ID NO: 795 - RNA, 21 nt, Homo sapiens
aagccugcccggcuccucggg

SEQ ID NO: 796 - RNA, 22 nt, Homo sapiens
ugugucacucgaugaccacugu

SEQ ID NO: 797 - RNA, 22 nt, Homo sapiens
uacgucaucguugucaucguca

SEQ ID NO: 798 - RNA, 20 nt, Homo sapiens
guugugucaguuuaucaaac

SEQ ID NO: 799 - RNA, 23 nt, Homo sapiens
acuuacagacaagagccuugcuc

SEQ ID NO: 800 - RNA, 22 nt, Homo sapiens
uggucuaggauuguuggaggag

SEQ ID NO: 801 - RNA, 23 nt, Homo sapiens
gacacgggcgacagcugcggccc

SEQ ID NO: 802 - RNA, 22 nt, Homo sapiens
cacacacugcaauuacuuuugc

SEQ ID NO: 803 - RNA, 19 nt, Homo sapiens
aggcugcggaauucaggac

SEQ ID NO: 804 - RNA, 23 nt, Homo sapiens
uaaaucccauggugccuucuccu

SEQ ID NO: 805 - RNA, 21 nt, Homo sapiens
aaacuacugaaaaucaaagau

SEQ ID NO: 806 - RNA, 21 nt, Homo sapiens
guucaaauccagaucuauaac

SEQ ID NO: 807 - RNA, 25 nt, Homo sapiens
aggggugguguugggacagcuccgu

SEQ ID NO: 808 - RNA, 20 nt, Homo sapiens
aggguguuucucucaucucu

SEQ ID NO: 809 - RNA, 21 nt, Homo sapiens
ugagcuaaaugugugcuggga

SEQ ID NO: 810 - RNA, 23 nt, Homo sapiens
gcgaggaccccucggggucugac

SEQ ID NO: 811 - RNA, 25 nt, Homo sapiens
gcugggcagggcuucugagcuccuu

SEQ ID NO: 812 - RNA, 20 nt, Homo sapiens
aggaauguuccuucuuugcc

SEQ ID NO: 813 - RNA, 23 nt, Homo sapiens
gaacgccuguucuugccaggugg

SEQ ID NO: 814 - RNA, 22 nt, Homo sapiens
uccgagccugggucucccucuu

SEQ ID NO: 815 - RNA, 22 nt, Homo sapiens
ggggguccccggugcucggauc

SEQ ID NO: 816 - RNA, 22 nt, Homo sapiens
agucauuggaggguuugagcag

SEQ ID NO: 817 - RNA, 22 nt, Homo sapiens
acucaaaacccuucagugacuu

SEQ ID NO: 818 - RNA, 22 nt, Homo sapiens
agacuucccauuugaagguggc

SEQ ID NO: 819 - RNA, 23 nt, Homo sapiens
aaacucuacuuguccuucugagu

SEQ ID NO: 820 - RNA, 24 nt, Homo sapiens
gaccuggacauguuugugcccagu

SEQ ID NO: 821 - RNA, 20 nt, Homo sapiens
auggagauagauauagaaau

SEQ ID NO: 822 - RNA, 21 nt, Homo sapiens
ggcuagcaacagcgcuuaccu

SEQ ID NO: 823 - RNA, 21 nt, Homo sapiens
acagucugcugagguuggagc

SEQ ID NO: 824 - RNA, 23 nt, Homo sapiens
aucccuugcaggggcuguugggu

SEQ ID NO: 825 - RNA, 21 nt, Homo sapiens
cacaagguauugguauuaccu

SEQ ID NO: 826 - RNA, 22 nt, Homo sapiens
uaguaccaguaccuuguguuca

SEQ ID NO: 827 - RNA, 21 nt, Homo sapiens
agggggaaaguucuauagucc

SEQ ID NO: 828 - RNA, 22 nt, Homo sapiens
gacuauagaacuuucccccuca

SEQ ID NO: 829 - RNA, 19 nt, Homo sapiens
agcugucugaaaaugucuu

SEQ ID NO: 830 - RNA, 22 nt, Homo sapiens
gugagucucuaagaaaagagga

SEQ ID NO: 831 - RNA, 21 nt, Homo sapiens
ucuaguaagaguggcagucga

SEQ ID NO: 832 - RNA, 22 nt, Homo sapiens
augcugacauauuuacuagagg

SEQ ID NO: 833 - RNA, 21 nt, Homo sapiens
uggguuuacguugggagaacu

SEQ ID NO: 834 - RNA, 22 nt, Homo sapiens
guucucccaacguaagcccagc

SEQ ID NO: 835 - RNA, 22 nt, Homo sapiens
aguauucuguaccagggaaggu

SEQ ID NO: 836 - RNA, 21 nt, Homo sapiens
agaccuggcccagaccucagc

SEQ ID NO: 837 - RNA, 19 nt, Homo sapiens
gugucugcuuccuguggga

SEQ ID NO: 838 - RNA, 23 nt, Homo sapiens
cuaauaguaucuaccacaauaaa

SEQ ID NO: 839 - RNA, 22 nt, Homo sapiens
aaccagcaccccaacuuuggac

SEQ ID NO: 840 - RNA, 23 nt, Homo sapiens
acuugggcacugaaacaaugucc

SEQ ID NO: 841 - RNA, 23 nt, Homo sapiens
ugugcuugcucgucccgcccgca

SEQ ID NO: 842 - RNA, 24 nt, Homo sapiens
acugggggcuuucgggcucugcgu

SEQ ID NO: 843 - RNA, 25 nt, Homo sapiens
agggaucgcgggcggguggcggccu

SEQ ID NO: 844 - RNA, 23 nt, Homo sapiens
aucgcugcgguugcgagcgcugu

SEQ ID NO: 845 - RNA, 21 nt, Homo sapiens
augauccaggaaccugccucu

SEQ ID NO: 846 - RNA, 24 nt, Homo sapiens
aaagacauaggauagagucaccuc

SEQ ID NO: 847 - RNA, 22 nt, Homo sapiens
gucccucuccaaaugugucuug

SEQ ID NO: 848 - RNA, 22 nt, Homo sapiens
acuuguaugcuagcucagguag

SEQ ID NO: 849 - RNA, 19 nt, Homo sapiens
aguguggcuuucuuagagc

SEQ ID NO: 850 - RNA, 19 nt, Homo sapiens
ucuaggcugguacugcuga

SEQ ID NO: 851 - RNA, 19 nt, Homo sapiens
aagcagcugccucugaggc

SEQ ID NO: 852 - RNA, 21 nt, Homo sapiens
guggcugcacucacuuccuuc

SEQ ID NO: 853 - RNA, 19 nt, Homo sapiens
aagugugcagggcacuggu

SEQ ID NO: 854 - RNA, 22 nt, Homo sapiens
aaaccuguguuguucaagaguc

SEQ ID NO: 855 - RNA, 21 nt, Homo sapiens
aggaggcagcgcucucaggac

SEQ ID NO: 856 - RNA, 22 nt, Homo sapiens
uuuaggauaagcuugacuuuug

SEQ ID NO: 857 - RNA, 21 nt, Homo sapiens
aauggcgccacuaggguugug

SEQ ID NO: 858 - RNA, 21 nt, Homo sapiens
guguugaaacaaucucuacug

SEQ ID NO: 859 - RNA, 22 nt, Homo sapiens
uaugucugcugaccaucaccuu

SEQ ID NO: 860 - RNA, 22 nt, Homo sapiens
uggugggccgcagaacaugugc

SEQ ID NO: 861 - RNA, 22 nt, Homo sapiens
auaauacaugguuaaccucuuu

SEQ ID NO: 862 - RNA, 21 nt, Homo sapiens
aauauuauacagucaaccucu

SEQ ID NO: 863 - RNA, 23 nt, Homo sapiens
ggcagguucucacccucucuagg

SEQ ID NO: 864 - RNA, 25 nt, Homo sapiens
ggcggagggaaguagguccguuggu

SEQ ID NO: 865 - RNA, 22 nt, Homo sapiens
cuugguucagggagggucccca

SEQ ID NO: 866 - RNA, 22 nt, Homo sapiens
uacccauugcauaucggaguug

SEQ ID NO: 867 - RNA, 24 nt, Homo sapiens
ugccugggucucuggccugcgcgu

SEQ ID NO: 868 - RNA, 21 nt, Homo sapiens
ucccacguuguggcccagcag

SEQ ID NO: 869 - RNA, 22 nt, Homo sapiens
aggcggggcgccgcgggaccgc

SEQ ID NO: 870 - RNA, 22 nt, Homo sapiens
gguggcccggccgugccugagg

SEQ ID NO: 871 - RNA, 23 nt, Homo sapiens
uauucauuuauccccagccuaca

SEQ ID NO: 872 - RNA, 24 nt, Homo sapiens
acuggcuagggaaaaugauuggau

SEQ ID NO: 873 - RNA, 20 nt, Homo sapiens
accaggaggcugaggccccu

SEQ ID NO: 874 - RNA, 23 nt, Homo sapiens
ugucacucggcucggcccacuac

SEQ ID NO: 875 - RNA, 21 nt, Homo sapiens
uccgguucucagggcuccacc

SEQ ID NO: 876 - RNA, 23 nt, Homo sapiens
aggaagcccuggaggggcuggag

SEQ ID NO: 877 - RNA, 23 nt, Homo sapiens
uggugcggagagggcccacagug

SEQ ID NO: 878 - RNA, 20 nt, Homo sapiens
cuguaugcccucaccgcuca

SEQ ID NO: 879 - RNA, 23 nt, Homo sapiens
uggaagacuagugauuuuguugu

SEQ ID NO: 880 - RNA, 22 nt, Homo sapiens
caacaaaucacagucugccaua

SEQ ID NO: 881 - RNA, 22 nt, Homo sapiens
caacaaaucccagucuaccuaa

SEQ ID NO: 882 - RNA, 23 nt, Homo sapiens
aaggagcuuacaaucuagcuggg

SEQ ID NO: 883 - RNA, 22 nt, Homo sapiens
caacuagacugugagcuucuag

SEQ ID NO: 884 - RNA, 17 nt, Homo sapiens
ucucgcuggggccucca

SEQ ID NO: 885 - RNA, 22 nt, Homo sapiens
ugcggggcuagggcuaacagca

SEQ ID NO: 886 - RNA, 22 nt, Homo sapiens
cuguugccacuaaccucaaccu

SEQ ID NO: 887 - RNA, 22 nt, Homo sapiens
uuugugaccugguccacuaacc

SEQ ID NO: 888 - RNA, 20 nt, Homo sapiens
cggcucugggucugugggga

SEQ ID NO: 889 - RNA, 21 nt, Homo sapiens
uggaggagaaggaaggugaug

SEQ ID NO: 890 - RNA, 22 nt, Homo sapiens
acuccagccccacagccucagc

SEQ ID NO: 891 - RNA, 23 nt, Homo sapiens
ucugcucauaccccaugguuucu

SEQ ID NO: 892 - RNA, 23 nt, Homo sapiens
ugcaccaugguugucugagcaug

SEQ ID NO: 893 - RNA, 23 nt, Homo sapiens
cugggaucuccggggucuugguu

SEQ ID NO: 894 - RNA, 22 nt, Homo sapiens
ugagaccucuggguucugagcu

SEQ ID NO: 895 - RNA, 23 nt, Homo sapiens
uccaguaccacgugucagggcca

SEQ ID NO: 896 - RNA, 23 nt, Homo sapiens
caguaacaaagauucauccuugu

SEQ ID NO: 897 - RNA, 21 nt, Homo sapiens
gcaggaacuugugagucuccu

SEQ ID NO: 898 - RNA, 22 nt, Homo sapiens
cugcccuggcccgagggaccga

SEQ ID NO: 899 - RNA, 21 nt, Homo sapiens
ccuggaaacacugagguugug

SEQ ID NO: 900 - RNA, 22 nt, Homo sapiens
uauaccucaguuuuaucaggug

SEQ ID NO: 901 - RNA, 22 nt, Homo sapiens
uggugguuuacaaaguaauuca

SEQ ID NO: 902 - RNA, 22 nt, Homo sapiens
uggauuucuuugugaaucacca

SEQ ID NO: 903 - RNA, 20 nt, Homo sapiens
guagaggagauggcgcaggg

SEQ ID NO: 904 - RNA, 21 nt, Homo sapiens
uccucuucucccuccucccag

SEQ ID NO: 905 - RNA, 22 nt, Homo sapiens
aggcagcgggguguaguggaua

SEQ ID NO: 906 - RNA, 22 nt, Homo sapiens
uccauuacacuacccugccucu

SEQ ID NO: 907 - RNA, 21 nt, Homo sapiens
cgcgggugcuuacugacccuu

SEQ ID NO: 908 - RNA, 23 nt, Homo sapiens
cgggucggaguuagcucaagcgg

SEQ ID NO: 909 - RNA, 22 nt, Homo sapiens
gugaacgggcgccaucccgagg

SEQ ID NO: 910 - RNA, 21 nt, Homo sapiens
uacucaaaaagcugucaguca

SEQ ID NO: 911 - RNA, 22 nt, Homo sapiens
gacugacaccucuuugggugaa

SEQ ID NO: 912 - RNA, 21 nt, Homo sapiens
uuaauaucggacaaccauugu

SEQ ID NO: 913 - RNA, 21 nt, Homo sapiens
uacuuggaaaggcaucaguug

SEQ ID NO: 914 - RNA, 22 nt, Homo sapiens
ugcaacgaaccugagccacuga

SEQ ID NO: 915 - RNA, 22 nt, Homo sapiens
ugcaacuuaccugagucauuga

SEQ ID NO: 916 - RNA, 21 nt, Homo sapiens
cacuguguccuuucugcguag

SEQ ID NO: 917 - RNA, 22 nt, Homo sapiens
cacuggcuccuuucuggguaga

SEQ ID NO: 918 - RNA, 23 nt, Homo sapiens
ucuuugguuaucuagcuguauga

SEQ ID NO: 919 - RNA, 22 nt, Homo sapiens
auaaagcuagauaaccgaaagu

SEQ ID NO: 920 - RNA, 20 nt, Homo sapiens
ggggagcuguggaagcagua

SEQ ID NO: 921 - RNA, 25 nt, Homo sapiens
cuagugagggacagaaccaggauuc

SEQ ID NO: 922 - RNA, 23 nt, Homo sapiens
gcagcagagaauaggacuacguc

SEQ ID NO: 923 - RNA, 21 nt, Homo sapiens
gucagcggaggaaaagaaacu

SEQ ID NO: 924 - RNA, 20 nt, Homo sapiens
agagucuugugaugucuugc

SEQ ID NO: 925 - RNA, 22 nt, Homo sapiens
uauugcacuugucccggccugu

SEQ ID NO: 926 - RNA, 23 nt, Homo sapiens
agguugggaucgguugcaaugcu

SEQ ID NO: 927 - RNA, 22 nt, Homo sapiens
ggguggggauuuguugcauuac

SEQ ID NO: 928 - RNA, 22 nt, Homo sapiens
uauugcacucgucccggccucc

SEQ ID NO: 929 - RNA, 22 nt, Homo sapiens
agggacgggacgcggugcagug

SEQ ID NO: 930 - RNA, 23 nt, Homo sapiens
caaagugcuguucgugcagguag

SEQ ID NO: 931 - RNA, 22 nt, Homo sapiens
acugcugagcuagcacuucccg

SEQ ID NO: 932 - RNA, 22 nt, Homo sapiens
ugugcgcagggagaccucuccc

SEQ ID NO: 933 - RNA, 22 nt, Homo sapiens
ugucuacuacuggagacacugg

SEQ ID NO: 934 - RNA, 23 nt, Homo sapiens
ccaguuaccgcuuccgcuaccgc

SEQ ID NO: 935 - RNA, 22 nt, Homo sapiens
acaguagagggaggaaucgcag

SEQ ID NO: 936 - RNA, 22 nt, Homo sapiens
auccgcgcucugacucucugcc

SEQ ID NO: 937 - RNA, 22 nt, Homo sapiens
ugcccuuaaaggugaacccagu

SEQ ID NO: 938 - RNA, 24 nt, Homo sapiens
uggggagcugaggcucugggggug

SEQ ID NO: 939 - RNA, 21 nt, Homo sapiens
aaggcagggcccccgcucccc

SEQ ID NO: 940 - RNA, 23 nt, Homo sapiens
cacccggcugugugcacaugugc

SEQ ID NO: 941 - RNA, 22 nt, Homo sapiens
ucuucucuguuuuggccaugug

SEQ ID NO: 942 - RNA, 21 nt, Homo sapiens
cugacuguugccguccuccag

SEQ ID NO: 943 - RNA, 22 nt, Homo sapiens
aaauuauuguacaucggaugag

SEQ ID NO: 944 - RNA, 22 nt, Homo sapiens
uucaacggguauuuauugagca

SEQ ID NO: 945 - RNA, 23 nt, Homo sapiens
uuuggcacuagcacauuuuugcu

SEQ ID NO: 946 - RNA, 22 nt, Homo sapiens
aaucaugugcagugccaauaug

SEQ ID NO: 947 - RNA, 22 nt, Homo sapiens
ugagguaguaaguuguauuguu

SEQ ID NO: 948 - RNA, 22 nt, Homo sapiens
aacccguagauccgaucuugug

SEQ ID NO: 949 - RNA, 22 nt, Homo sapiens
caagcucgcuucuaugggucug

SEQ ID NO: 950 - RNA, 22 nt, Homo sapiens
cacccguagaaccgaccuugcg

SEQ ID NO: 951 - RNA, 22 nt, Homo sapiens
caagcucgugucuguggguccg

SEQ ID NO: 952 - RNA, 21 nt, Herpes simplex virus 1
uggaaggacgggaaguggaag

SEQ ID NO: 953 - RNA, 24 nt, Herpes simplex virus 1
ccugagccagggacgagugcgacu

SEQ ID NO: 954 - RNA, 22 nt, Herpes simplex virus 1
ucgcacgcgcccggcacagacu

SEQ ID NO: 955 - RNA, 20 nt, Herpes simplex virus 1
cugggacugugcgguuggga

SEQ ID NO: 956 - RNA, 22 nt, Herpes simplex virus 1
cuugccugucuaacucgcuagu

SEQ ID NO: 957 - RNA, 22 nt, Herpes simplex virus 1
gguagaguuugacaggcaagca

SEQ ID NO: 958 - RNA, 22 nt, Herpes simplex virus 1
gucagagauccaaacccuccgg

SEQ ID NO: 959 - RNA, 21 nt, Herpes simplex virus 1
cacuucccguccuuccauccc

SEQ ID NO: 960 - RNA, 23 nt, Kaposi sarcoma-associated herpesvirus
auuacaggaaacuggguguaagc

SEQ ID NO: 961 - RNA, 22 nt, Kaposi sarcoma-associated herpesvirus
uaguguuguccccccgaguggc

SEQ ID NO: 962 - RNA, 22 nt, Kaposi sarcoma-associated herpesvirus
ugguguuguccccccgaguggc

SEQ ID NO: 963 - RNA, 22 nt, Kaposi sarcoma-associated herpesvirus
uuaaugcuuagccuguguccga

SEQ ID NO: 964 - RNA, 22 nt, Kaposi sarcoma-associated herpesvirus
accaggccaccauuccucuccg

SEQ ID NO: 965 - RNA, 22 nt, Kaposi sarcoma-associated herpesvirus
aacuguaguccgggucgaucug

SEQ ID NO: 966 - RNA, 23 nt, Kaposi sarcoma-associated herpesvirus
ucacauucugaggacggcagcga

SEQ ID NO: 967 - RNA, 21 nt, Kaposi sarcoma-associated herpesvirus
ucgcggucacagaaugugaca

SEQ ID NO: 968 - RNA, 22 nt, Kaposi sarcoma-associated herpesvirus
uagaauacugaggccuagcuga

SEQ ID NO: 969 - RNA, 22 nt, Kaposi sarcoma-associated herpesvirus
agcuaaaccgcaguacucuagg

SEQ ID NO: 970 - RNA, 22 nt, Kaposi sarcoma-associated herpesvirus
uaggaugccuggaacuugccgg

SEQ ID NO: 971 - RNA, 22 nt, Kaposi sarcoma-associated herpesvirus
ugaugguuuucgggcuguugag

SEQ ID NO: 972 - RNA, 22 nt, Kaposi sarcoma-associated herpesvirus
ccagcagcaccuaauccaucgg

SEQ ID NO: 973 - RNA, 21 nt, Kaposi sarcoma-associated herpesvirus
ugaucccauguugcuggcgcu

SEQ ID NO: 974 - RNA, 22 nt, Kaposi sarcoma-associated herpesvirus
uaggcgcgacugagagagcacg

SEQ ID NO: 975 - RNA, 22 nt, Kaposi sarcoma-associated herpesvirus
cuggguauacgcagcugcguaa

SEQ ID NO: 976 - RNA, 22 nt, Kaposi sarcoma-associated herpesvirus
acccagcugcguaaaccccgcu

SEQ ID NO: 977 - DNA, 9 bp, artificial
  LNA Oligomer
agcggtgct

SEQ ID NO: 978 - DNA, 9 bp, artificial
  LNA oligomer
tccactaag

SEQ ID NO: 979 - DNA, 9 bp, artificial
  LNA Oligomer
tggttatgt

SEQ ID NO: 980 - DNA, 9 bp, artificial
  LNA Oligomer
aagaggtgg

SEQ ID NO: 981 - DNA, 9 bp, artificial
  LNA Oligomer
tggtgtgcg

SEQ ID NO: 982 - DNA, 9 bp, artificial
  LNA Oligomer
aactgtctg

SEQ ID NO: 983 - DNA, 9 bp, artificial
  LNA Oligomer
caccacagg

SEQ ID NO: 984 - DNA, 9 bp, artificial
  LNA Oligomer
gcaagttac

SEQ ID NO: 985 - DNA, 9 bp, artificial
  LNA Oligomer
cgagccggt

SEQ ID NO: 986 - DNA, 9 bp, artificial
  LNA Oligomer
gcagcattt

SEQ ID NO: 987 - DNA, 9 bp, artificial
  LNA Oligomer
gcgtagggt

SEQ ID NO: 988 - DNA, 9 bp, artificial
  LNA Oligomer
aaccactga

SEQ ID NO: 989 - DNA, 9 bp, artificial
  LNA Oligomer
ctctatcta

SEQ ID NO: 990 - DNA, 9 bp, artificial
  LNA Oligomer
caggcatac

SEQ ID NO: 991 - DNA, 9 bp, artificial
  LNA Oligomer
cgtcctctt

SEQ ID NO: 992 - DNA, 9 bp, artificial
  LNA Oligomer
acttccgat

SEQ ID NO: 993 - DNA, 9 bp, artificial
  LNA Oligomer
gcgaacttg

SEQ ID NO: 994 - DNA, 9 bp, artificial
  LNA Oligomer
gcaaacaaa

SEQ ID NO: 995 - DNA, 9 bp, artificial
  LNA Oligomer
cggggaatg

SEQ ID NO: 996 - DNA, 9 bp, artificial
  LNA Oligomer
atcgctcct

SEQ ID NO: 997 - DNA, 9 bp, artificial
  LNA Oligomer
gcagaaaat

SEQ ID NO: 998 - DNA, 9 bp, artificial
  LNA Oligomer
tgccttcat

SEQ ID NO: 999 - DNA, 9 bp, artificial
  LNA Oligomer
atgcctgct

SEQ ID NO: 1000 - DNA, 9 bp, artificial
  LNA Oligomer
tagtggtgc

SEQ ID NO: 1001 - DNA, 9 bp, artificial
  LNA Oligomer
aacactagg

SEQ ID NO: 1002 - DNA, 9 bp, artificial
  LNA Oligomer
gcatcaggt

SEQ ID NO: 1003 - DNA, 9 bp, artificial
  LNA Oligomer
attcacctt

SEQ ID NO: 1004 - DNA, 9 bp, artificial
  LNA Oligomer
ccgatcccc

SEQ ID NO: 1005 - DNA, 9 bp, artificial
  LNA Oligomer
accaacctt

SEQ ID NO: 1006 - DNA, 9 bp, artificial
  LNA Oligomer
gactatgat

SEQ ID NO: 1007 - DNA, 9 bp, artificial
  LNA Oligomer
aaggtccag

SEQ ID NO: 1008 - DNA, 9 bp, artificial
  LNA Oligomer
ggaaaccgt

SEQ ID NO: 1009 - DNA, 9 bp, artificial
  LNA Oligomer
agattgtga

SEQ ID NO: 1010 - DNA, 9 bp, artificial
  LNA Oligomer
tgaagtgtt

SEQ ID NO: 1011 - DNA, 9 bp, artificial
  LNA Oligomer
gggtccagt

SEQ ID NO: 1012 - DNA, 9 bp, artificial
  LNA Oligomer
gatcaggtt

SEQ ID NO: 1013 - DNA, 9 bp, artificial
  LNA Oligomer
gcaaaagat

SEQ ID NO: 1014 - DNA, 9 bp, artificial
  LNA Oligomer
aacagaatt

SEQ ID NO: 1015 - DNA, 9 bp, artificial
  LNA Oligomer
cttcccgtt

SEQ ID NO: 1016 - DNA, 9 bp, artificial
  LNA Oligomer
accgtcact

SEQ ID NO: 1017 - DNA, 9 bp, artificial
  LNA Oligomer
gggaggacg

SEQ ID NO: 1018 - DNA, 9 bp, artificial
  LNA Oligomer
aggctagtt

SEQ ID NO: 1019 - DNA, 9 bp, artificial
  LNA Oligomer
attctggtg

SEQ ID NO: 1020 - DNA, 9 bp, artificial
  LNA Oligomer
tcttcaacg

SEQ ID NO: 1021 - DNA, 9 bp, artificial
  LNA Oligomer
cacctggaa

SEQ ID NO: 1022 - DNA, 9 bp, artificial
  LNA Oligomer
gcccatccc

SEQ ID NO: 1023 - DNA, 9 bp, artificial
  LNA Oligomer
ccgagacgc

SEQ ID NO: 1024 - DNA, 9 bp, artificial
  LNA Oligomer
ctgagcggt

SEQ ID NO: 1025 - DNA, 9 bp, artificial
  LNA Oligomer
agcgttcgg

SEQ ID NO: 1026 - DNA, 9 bp, artificial
  LNA Oligomer
ccaagtgga

SEQ ID NO: 1027 - DNA, 9 bp, artificial
  LNA Oligomer
acagaccgc

SEQ ID NO: 1028 - DNA, 9 bp, artificial
  LNA Oligomer
cggaccgtg

SEQ ID NO: 1029 - DNA, 9 bp, artificial
  LNA Oligomer
gggcacaat

SEQ ID NO: 1030 - DNA, 9 bp, artificial
  LNA Oligomer
gtccatgtc

SEQ ID NO: 1031 - DNA, 9 bp, artificial
  LNA Oligomer
aggcttgtc

SEQ ID NO: 1032 - DNA, 9 bp, artificial
  LNA Oligomer
cctatcata

SEQ ID NO: 1033 - DNA, 9 bp, artificial
  LNA Oligomer
tactacctc

SEQ ID NO: 1034 - DNA, 9 bp, artificial
  LNA Oligomer
gattgtata

SEQ ID NO: 1035 - DNA, 9 bp, artificial
  LNA Oligomer
tactacctc

SEQ ID NO: 1036 - DNA, 9 bp, artificial
  LNA Oligomer
ggttgtata

SEQ ID NO: 1037 - DNA, 9 bp, artificial
  LNA Oligomer
tactacctc

SEQ ID NO: 1038 - DNA, 9 bp, artificial
  LNA Oligomer
tgtaactct

SEQ ID NO: 1039 - DNA, 9 bp, artificial
  LNA Oligomer
tactacctc

SEQ ID NO: 1040 - DNA, 9 bp, artificial
  LNA Oligomer
ggtcgtata

SEQ ID NO: 1041 - DNA, 9 bp, artificial
  LNA Oligomer
tcctacctc

SEQ ID NO: 1042 - DNA, 9 bp, artificial
  LNA Oligomer
ggccgtata

SEQ ID NO: 1043 - DNA, 9 bp, artificial
  LNA Oligomer
tactacctc

SEQ ID NO: 1044 - DNA, 9 bp, artificial
  LNA Oligomer
gattgtata

SEQ ID NO: 1045 - DNA, 9 bp, artificial
  LNA Oligomer
gactgtata

SEQ ID NO: 1046 - DNA, 9 bp, artificial
  LNA Oligomer
tactacctc

SEQ ID NO: 1047 - DNA, 9 bp, artificial
  LNA Oligomer
gcctgtaca

SEQ ID NO: 1048 - DNA, 9 bp, artificial
  LNA Oligomer
tactacctc

SEQ ID NO: 1049 - DNA, 9 bp, artificial
  LNA Oligomer
gcttgcgca

SEQ ID NO: 1050 - DNA, 9 bp, artificial
  LNA Oligomer
ttacattcc

SEQ ID NO: 1051 - DNA, 9 bp, artificial
  LNA Oligomer
tctacgggt

SEQ ID NO: 1052 - DNA, 9 bp, artificial
  LNA Oligomer
tacaagctt

SEQ ID NO: 1053 - DNA, 9 bp, artificial
  LNA Oligomer
cagtactgt

SEQ ID NO: 1054 - DNA, 9 bp, artificial
  LNA Oligomer
gtgataact

SEQ ID NO: 1055 - DNA, 9 bp, artificial
  LNA Oligomer
caatgctgc

SEQ ID NO: 1056 - DNA, 9 bp, artificial
  LNA Oligomer
agggctatg

SEQ ID NO: 1057 - DNA, 9 bp, artificial
  LNA Oligomer
gagcatttg

SEQ ID NO: 1058 - DNA, 9 bp, artificial
  LNA Oligomer
aaacatccg

SEQ ID NO: 1059 - DNA, 9 bp, artificial
  LNA Oligomer
aagcacttt

SEQ ID NO: 1060 - DNA, 9 bp, artificial
  LNA Oligomer
tacattgca

SEQ ID NO: 1061 - DNA, 9 bp, artificial
  LNA Oligomer
cagcacttt

SEQ ID NO: 1062 - DNA, 9 bp, artificial
  LNA Oligomer
cacagtgcg

SEQ ID NO: 1063 - DNA, 9 bp, artificial
  LNA Oligomer
caatgctgc

SEQ ID NO: 1064 - DNA, 9 bp, artificial
  LNA Oligomer
ctacagggt

SEQ ID NO: 1065 - DNA, 9 bp, artificial
  LNA Oligomer
tacgaattt

SEQ ID NO: 1066 - DNA, 9 bp, artificial
  LNA Oligomer
ctacagggt

SEQ ID NO: 1067 - DNA, 9 bp, artificial
  LNA Oligomer
tcgaatctg

SEQ ID NO: 1068 - DNA, 9 bp, artificial
  LNA Oligomer
cagtgagca

SEQ ID NO: 1069 - DNA, 9 bp, artificial
  LNA Oligomer
aagaatgct

SEQ ID NO: 1070 - DNA, 9 bp, artificial
  LNA Oligomer
gagccggaa

SEQ ID NO: 1071 - DNA, 9 bp, artificial
  LNA Oligomer
gcggcgacg

SEQ ID NO: 1072 - DNA, 9 bp, artificial
  LNA Oligomer
caagaccct

SEQ ID NO: 1073 - DNA, 9 bp, artificial
  LNA Oligomer
acctacagt

SEQ ID NO: 1074 - DNA, 9 bp, artificial
  LNA Oligomer
tcgctgcag

SEQ ID NO: 1075 - DNA, 9 bp, artificial
  LNA Oligomer
ggtatcctc

SEQ ID NO: 1076 - DNA, 9 bp, artificial
  LNA Oligomer
atgtgtcct

SEQ ID NO: 1077 - DNA, 9 bp, artificial
  LNA Oligomer
ggctcagga

SEQ ID NO: 1078 - DNA, 9 bp, artificial
  LNA Oligomer
taatcaggc

SEQ ID NO: 1079 - DNA, 9 bp, artificial
  LNA Oligomer
cagctggca

SEQ ID NO: 1080 - DNA, 9 bp, artificial
  LNA Oligomer
tggctccgg

SEQ ID NO: 1081 - DNA, 9 bp, artificial
  LNA Oligomer
caggccacg

SEQ ID NO: 1082 - DNA, 9 bp, artificial
  LNA Oligomer
accctgcag

SEQ ID NO: 1083 - DNA, 9 bp, artificial
  LNA Oligomer
tacatgaac

SEQ ID NO: 1084 - DNA, 9 bp, artificial
  LNA Oligomer
ggccagctg

SEQ ID NO: 1085 - DNA, 9 bp, artificial
  LNA Oligomer
ctccctgcc

SEQ ID NO: 1086 - DNA, 9 bp, artificial
  LNA Oligomer
tgaacagtg

SEQ ID NO: 1087 - DNA, 9 bp, artificial
  LNA Oligomer
tcacactcc

SEQ ID NO: 1088 - DNA, 9 bp, artificial
  LNA Oligomer
taatggcgt

SEQ ID NO: 1089 - DNA, 9 bp, artificial
  LNA Oligomer
ggaggtggg

SEQ ID NO: 1090 - DNA, 9 bp, artificial
  LNA Oligomer
gagtcctca

SEQ ID NO: 1091 - DNA, 9 bp, artificial
  LNA Oligomer
caggggctc

SEQ ID NO: 1092 - DNA, 9 bp, artificial
  LNA Oligomer
ccgtaccca

SEQ ID NO: 1093 - DNA, 9 bp, artificial
  LNA Oligomer
gggctggtg

SEQ ID NO: 1094 - DNA, 9 bp, artificial
  LNA Oligomer
atgccctca

SEQ ID NO: 1095 - DNA, 9 bp, artificial
  LNA Oligomer
gggtggcac

SEQ ID NO: 1096 - DNA, 9 bp, artificial
  LNA Oligomer
gcaggtgtg

SEQ ID NO: 1097 - DNA, 9 bp, artificial
  LNA Oligomer
ccccgccca

SEQ ID NO: 1098 - DNA, 9 bp, artificial
  LNA Oligomer
gtggtgaga

SEQ ID NO: 1099 - DNA, 9 bp, artificial
  LNA Oligomer
gcccagaca

SEQ ID NO: 1100 - DNA, 9 bp, artificial
  LNA Oligomer
acagggctc

SEQ ID NO: 1101 - DNA, 9 bp, artificial
  LNA Oligomer
gtcaggccg

SEQ ID NO: 1102 - DNA, 9 bp, artificial
  LNA Oligomer
ggggaagag

SEQ ID NO: 1103 - DNA, 9 bp, artificial
  LNA Oligomer
agcagaagg

SEQ ID NO: 1104 - DNA, 9 bp, artificial
  LNA Oligomer
gacgaggaa

SEQ ID NO: 1105 - DNA, 9 bp, artificial
  LNA Oligomer
gcgtgcctt

SEQ ID NO: 1106 - DNA, 9 bp, artificial
  LNA Oligomer
tgtgaacac

SEQ ID NO: 1107 - DNA, 9 bp, artificial
  LNA Oligomer
tgatccagt

SEQ ID NO: 1108 - DNA, 9 bp, artificial
  LNA Oligomer
ccaactact

SEQ ID NO: 1109 - DNA, 9 bp, artificial
  LNA Oligomer
tagatcact

SEQ ID NO: 1110 - DNA, 9 bp, artificial
  LNA Oligomer
aaaatccat

SEQ ID NO: 1111 - DNA, 9 bp, artificial
  LNA Oligomer
cgggacggg

SEQ ID NO: 1112 - DNA, 9 bp, artificial
  LNA Oligomer
acaagaagg

SEQ ID NO: 1113 - DNA, 9 bp, artificial
  LNA Oligomer
ggaagggcg

SEQ ID NO: 1114 - DNA, 9 bp, artificial
  LNA Oligomer
ccagcaccg

SEQ ID NO: 1115 - DNA, 9 bp, artificial
  LNA Oligomer
cagctagag

SEQ ID NO: 1116 - DNA, 9 bp, artificial
  LNA Oligomer
atttccttc

SEQ ID NO: 1117 - DNA, 9 bp, artificial
  LNA Oligomer
cttcttctc

SEQ ID NO: 1118 - DNA, 9 bp, artificial
  LNA Oligomer
cttccaggc

SEQ ID NO: 1119 - DNA, 9 bp, artificial
  LNA Oligomer
tgctcatcc

SEQ ID NO: 1120 - DNA, 9 bp, artificial
  LNA Oligomer
tgctcatcc

SEQ ID NO: 1121 - DNA, 9 bp, artificial
  LNA Oligomer
gtcaatgcc

SEQ ID NO: 1122 - DNA, 9 bp, artificial
  LNA Oligomer
atcattcac

SEQ ID NO: 1123 - DNA, 9 bp, artificial
  LNA Oligomer
aatcctaac

SEQ ID NO: 1124 - DNA, 9 bp, artificial
  LNA Oligomer
catcatata

SEQ ID NO: 1125 - DNA, 9 bp, artificial
  LNA Oligomer
cctcacctg

SEQ ID NO: 1126 - DNA, 9 bp, artificial
  LNA Oligomer
gtctcaggg

SEQ ID NO: 1127 - DNA, 9 bp, artificial
  LNA Oligomer
gtctcaggg

SEQ ID NO: 1128 - DNA, 9 bp, artificial
  LNA Oligomer
cctaacccg

SEQ ID NO: 1129 - DNA, 9 bp, artificial
  LNA Oligomer
tgacttgtg

SEQ ID NO: 1130 - DNA, 9 bp, artificial
  LNA Oligomer
cacggtacg

SEQ ID NO: 1131 - DNA, 9 bp, artificial
  LNA Oligomer
agtaataat

SEQ ID NO: 1132 - DNA, 9 bp, artificial
  LNA Oligomer
gaggtggga

SEQ ID NO: 1133 - DNA, 9 bp, artificial
  LNA Oligomer
ccttatcca

SEQ ID NO: 1134 - DNA, 9 bp, artificial
  LNA Oligomer
attcaccca

SEQ ID NO: 1135 - DNA, 9 bp, artificial
  LNA Oligomer
agggtacca

SEQ ID NO: 1136 - DNA, 9 bp, artificial
  LNA Oligomer
ataagactt

SEQ ID NO: 1137 - DNA, 9 bp, artificial
  LNA Oligomer
ccacatcct

SEQ ID NO: 1138 - DNA, 9 bp, artificial
  LNA Oligomer
agccctgag

SEQ ID NO: 1139 - DNA, 9 bp, artificial
  LNA Oligomer
cttcaacag

SEQ ID NO: 1140 - DNA, 9 bp, artificial
  LNA Oligomer
accacgccc

SEQ ID NO: 1141 - DNA, 9 bp, artificial
  LNA Oligomer
ctcagtcca

SEQ ID NO: 1142 - DNA, 9 bp, artificial
  LNA Oligomer
acggatccg

SEQ ID NO: 1143 - DNA, 9 bp, artificial
  LNA Oligomer
tgagcttca

SEQ ID NO: 1144 - DNA, 9 bp, artificial
  LNA Oligomer
atatctcca

SEQ ID NO: 1145 - DNA, 9 bp, artificial
  LNA Oligomer
aggtgccaa

SEQ ID NO: 1146 - DNA, 9 bp, artificial
  LNA Oligomer
catcatcat

SEQ ID NO: 1147 - DNA, 9 bp, artificial
  LNA Oligomer
tttgtcgcc

SEQ ID NO: 1148 - DNA, 9 bp, artificial
  LNA Oligomer
gaacaggga

SEQ ID NO: 1149 - DNA, 9 bp, artificial
  LNA Oligomer
cgaacaggg

SEQ ID NO: 1150 - DNA, 9 bp, artificial
  LNA Oligomer
tctccccca

SEQ ID NO: 1151 - DNA, 9 bp, artificial
  LNA Oligomer
gggctcttt

SEQ ID NO: 1152 - DNA, 9 bp, artificial
  LNA Oligomer
tatctacgt

SEQ ID NO: 1153 - DNA, 9 bp, artificial
  LNA Oligomer
cacagtact

SEQ ID NO: 1154 - DNA, 9 bp, artificial
  LNA Oligomer
agcaatatg

SEQ ID NO: 1155 - DNA, 9 bp, artificial
  LNA Oligomer
ttcactgtg

SEQ ID NO: 1156 - DNA, 9 bp, artificial
  LNA Oligomer
agcggtggg

SEQ ID NO: 1157 - DNA, 9 bp, artificial
  LNA Oligomer
gaggaggcg

SEQ ID NO: 1158 - DNA, 9 bp, artificial
  LNA Oligomer
aggcaaacg

SEQ ID NO: 1159 - DNA, 9 bp, artificial
  LNA Oligomer
cctttgtag

SEQ ID NO: 1160 - DNA, 9 bp, artificial
  LNA Oligomer
tctgtatag

SEQ ID NO: 1161 - DNA, 9 bp, artificial
  LNA Oligomer
gttgcccag

SEQ ID NO: 1162 - DNA, 9 bp, artificial
  LNA Oligomer
tggtcctgc

SEQ ID NO: 1163 - DNA, 9 bp, artificial
  LNA Oligomer
tgatccagc

SEQ ID NO: 1164 - DNA, 9 bp, artificial
  LNA Oligomer
gggcagtcc

SEQ ID NO: 1165 - DNA, 9 bp, artificial
  LNA Oligomer
ctggactcc

SEQ ID NO: 1166 - DNA, 9 bp, artificial
  LNA Oligomer
gtaagggct

SEQ ID NO: 1167 - DNA, 9 bp, artificial
  LNA Oligomer
gtaagggct

SEQ ID NO: 1168 - DNA, 9 bp, artificial
  LNA Oligomer
ccgcaaaaa

SEQ ID NO: 1169 - DNA, 9 bp, artificial
  LNA Oligomer
caaaaatcc

SEQ ID NO: 1170 - DNA, 9 bp, artificial
  LNA Oligomer
gtcagggcc

SEQ ID NO: 1171 - DNA, 9 bp, artificial
  LNA Oligomer
cccgttccc

SEQ ID NO: 1172 - DNA, 9 bp, artificial
  LNA Oligomer
agaccaccc

SEQ ID NO: 1173 - DNA, 9 bp, artificial
  LNA Oligomer
caacctcac

SEQ ID NO: 1174 - DNA, 9 bp, artificial
  LNA Oligomer
tgcggccta

SEQ ID NO: 1175 - DNA, 9 bp, artificial
  LNA Oligomer
agggcccta

SEQ ID NO: 1176 - DNA, 9 bp, artificial
  LNA Oligomer
attacttga

SEQ ID NO: 1177 - DNA, 9 bp, artificial
  LNA Oligomer
gccgaatga

SEQ ID NO: 1178 - DNA, 9 bp, artificial
  LNA Oligomer
aattccaga

SEQ ID NO: 1179 - DNA, 9 bp, artificial
  LNA Oligomer
tccttctca

SEQ ID NO: 1180 - DNA, 9 bp, artificial
  LNA Oligomer
gcagctgca

SEQ ID NO: 1181 - DNA, 9 bp, artificial
  LNA Oligomer
tatgtccca

SEQ ID NO: 1182 - DNA, 9 bp, artificial
  LNA Oligomer
cgtctctaa

SEQ ID NO: 1183 - DNA, 9 bp, artificial
  LNA Oligomer
tagcctcaa

SEQ ID NO: 1184 - DNA, 9 bp, artificial
  LNA Oligomer
gagttgaaa

SEQ ID NO: 1185 - DNA, 9 bp, artificial
  LNA Oligomer
gagccaacg

SEQ ID NO: 1186 - DNA, 9 bp, artificial
  LNA Oligomer
cacgccgag

SEQ ID NO: 1187 - DNA, 9 bp, artificial
  LNA Oligomer
ccacccatg

SEQ ID NO: 1188 - DNA, 9 bp, artificial
  LNA Oligomer
cattgcact

SEQ ID NO: 1189 - DNA, 9 bp, artificial
  LNA Oligomer
acaatgtga

SEQ ID NO: 1190 - DNA, 9 bp, artificial
  LNA Oligomer
cattgcact

SEQ ID NO: 1191 - DNA, 9 bp, artificial
  LNA Oligomer
gggaaagag

SEQ ID NO: 1192 - DNA, 9 bp, artificial
  LNA Oligomer
tagactgtt

SEQ ID NO: 1193 - DNA, 9 bp, artificial
  LNA Oligomer
aagccacgg

SEQ ID NO: 1194 - DNA, 9 bp, artificial
  LNA Oligomer
cacctccct

SEQ ID NO: 1195 - DNA, 9 bp, artificial
  LNA Oligomer
cagcatcat

SEQ ID NO: 1196 - DNA, 9 bp, artificial
  LNA Oligomer
tcagttttg

SEQ ID NO: 1197 - DNA, 9 bp, artificial
  LNA Oligomer
ttctgtctg

SEQ ID NO: 1198 - DNA, 9 bp, artificial
  LNA Oligomer
ggggaccaa

SEQ ID NO: 1199 - DNA, 9 bp, artificial
  LNA Oligomer
ggggaccaa

SEQ ID NO: 1200 - DNA, 9 bp, artificial
  LNA Oligomer
accagtcac

SEQ ID NO: 1201 - DNA, 9 bp, artificial
  LNA Oligomer
aaaagccat

SEQ ID NO: 1202 - DNA, 9 bp, artificial
  LNA Oligomer
aatccctat

SEQ ID NO: 1203 - DNA, 9 bp, artificial
  LNA Oligomer
aaaagccat

SEQ ID NO: 1204 - DNA, 9 bp, artificial
  LNA Oligomer
agccctaca

SEQ ID NO: 1205 - DNA, 9 bp, artificial
  LNA Oligomer
caaatggag

SEQ ID NO: 1206 - DNA, 9 bp, artificial
  LNA Oligomer
gacgatgat

SEQ ID NO: 1207 - DNA, 9 bp, artificial
  LNA Oligomer
taagcaata

SEQ ID NO: 1208 - DNA, 9 bp, artificial
  LNA Oligomer
aacaccagc

SEQ ID NO: 1209 - DNA, 9 bp, artificial
  LNA Oligomer
gtgaagtag

SEQ ID NO: 1210 - DNA, 9 bp, artificial
  LNA Oligomer
gtgaaatag

SEQ ID NO: 1211 - DNA, 9 bp, artificial
  LNA Oligomer
ccgcgtctc

SEQ ID NO: 1212 - DNA, 9 bp, artificial
  LNA Oligomer
gcactgtag

SEQ ID NO: 1213 - DNA, 9 bp, artificial
  LNA Oligomer
ccctgtggt

SEQ ID NO: 1214 - DNA, 9 bp, artificial
  LNA Oligomer
aaaaccact

SEQ ID NO: 1215 - DNA, 9 bp, artificial
  LNA Oligomer
gacagtgtt

SEQ ID NO: 1216 - DNA, 9 bp, artificial
  LNA Oligomer
ctggaagat

SEQ ID NO: 1217 - DNA, 9 bp, artificial
  LNA Oligomer
aaacactac

SEQ ID NO: 1218 - DNA, 9 bp, artificial
  LNA Oligomer
ctactttat

SEQ ID NO: 1219 - DNA, 9 bp, artificial
  LNA Oligomer
cttcatctc

SEQ ID NO: 1220 - DNA, 9 bp, artificial
  LNA Oligomer
gcactgcac

SEQ ID NO: 1221 - DNA, 9 bp, artificial
  LNA Oligomer
ctatactgt

SEQ ID NO: 1222 - DNA, 9 bp, artificial
  LNA Oligomer
gatgatatc

SEQ ID NO: 1223 - DNA, 9 bp, artificial
  LNA Oligomer
aaaactgga

SEQ ID NO: 1224 - DNA, 9 bp, artificial
  LNA Oligomer
ccaggaatc

SEQ ID NO: 1225 - DNA, 9 bp, artificial
  LNA Oligomer
gcaaacgga

SEQ ID NO: 1226 - DNA, 9 bp, artificial
  LNA Oligomer
ccgcgccga

SEQ ID NO: 1227 - DNA, 9 bp, artificial
  LNA Oligomer
tcagttctc

SEQ ID NO: 1228 - DNA, 9 bp, artificial
  LNA Oligomer
atttcagag

SEQ ID NO: 1229 - DNA, 9 bp, artificial
  LNA Oligomer
ccacagggc

SEQ ID NO: 1230 - DNA, 9 bp, artificial
  LNA Oligomer
tcagttctc

SEQ ID NO: 1231 - DNA, 9 bp, artificial
  LNA Oligomer
ttccacaca

SEQ ID NO: 1232 - DNA, 9 bp, artificial
  LNA Oligomer
ggcggaggg

SEQ ID NO: 1233 - DNA, 9 bp, artificial
  LNA Oligomer
acacgcggg

SEQ ID NO: 1234 - DNA, 9 bp, artificial
  LNA Oligomer
ttccgcaca

SEQ ID NO: 1235 - DNA, 9 bp, artificial
  LNA Oligomer
agtgcactg

SEQ ID NO: 1236 - DNA, 9 bp, artificial
  LNA Oligomer
tcagaactt

SEQ ID NO: 1237 - DNA, 9 bp, artificial
  LNA Oligomer
gatgcactg

SEQ ID NO: 1238 - DNA, 9 bp, artificial
  LNA Oligomer
aacagaact

SEQ ID NO: 1239 - DNA, 9 bp, artificial
  LNA Oligomer
cggagccag

SEQ ID NO: 1240 - DNA, 9 bp, artificial
  LNA Oligomer
gtccctccc

SEQ ID NO: 1241 - DNA, 9 bp, artificial
  LNA Oligomer
ggttgggag

SEQ ID NO: 1242 - DNA, 9 bp, artificial
  LNA Oligomer
cctgtacca

SEQ ID NO: 1243 - DNA, 9 bp, artificial
  LNA Oligomer
ttcagtcta

SEQ ID NO: 1244 - DNA, 9 bp, artificial
  LNA Oligomer
agctcctcg

SEQ ID NO: 1245 - DNA, 9 bp, artificial
  LNA Oligomer
catgcactg

SEQ ID NO: 1246 - DNA, 9 bp, artificial
  LNA Oligomer
gactatgca

SEQ ID NO: 1247 - DNA, 9 bp, artificial
  LNA Oligomer
agacggttt

SEQ ID NO: 1248 - DNA, 9 bp, artificial
  LNA Oligomer
gcccgggcc

SEQ ID NO: 1249 - DNA, 9 bp, artificial
  LNA Oligomer
acgcgcagg

SEQ ID NO: 1250 - DNA, 9 bp, artificial
  LNA Oligomer
ggataacct

SEQ ID NO: 1251 - DNA, 9 bp, artificial
  LNA Oligomer
gtgtatgat

SEQ ID NO: 1252 - DNA, 9 bp, artificial
  LNA Oligomer
ttagcatta

SEQ ID NO: 1253 - DNA, 9 bp, artificial
  LNA Oligomer
tatgtagga

SEQ ID NO: 1254 - DNA, 9 bp, artificial
  LNA Oligomer
tgtgctgct

SEQ ID NO: 1255 - DNA, 9 bp, artificial
  LNA Oligomer
atatggcct

SEQ ID NO: 1256 - DNA, 9 bp, artificial
  LNA Oligomer
tgtgctgct

SEQ ID NO: 1257 - DNA, 9 bp, artificial
  LNA Oligomer
taatgattc

SEQ ID NO: 1258 - DNA, 9 bp, artificial
  LNA Oligomer
cgtgctgct

SEQ ID NO: 1259 - DNA, 9 bp, artificial
  LNA Oligomer
ttaatactg

SEQ ID NO: 1260 - DNA, 9 bp, artificial
  LNA Oligomer
gtaatattg

SEQ ID NO: 1261 - DNA, 9 bp, artificial
  LNA Oligomer
aagcacttt

SEQ ID NO: 1262 - DNA, 9 bp, artificial
  LNA Oligomer
tcactgcag

SEQ ID NO: 1263 - DNA, 9 bp, artificial
  LNA Oligomer
gttgaatgt

SEQ ID NO: 1264 - DNA, 9 bp, artificial
  LNA Oligomer
ggtcgatgg

SEQ ID NO: 1265 - DNA, 9 bp, artificial
  LNA Oligomer
ggtcagtgg

SEQ ID NO: 1266 - DNA, 9 bp, artificial
  LNA Oligomer
aatgaatgt

SEQ ID NO: 1267 - DNA, 9 bp, artificial
  LNA Oligomer
gttgaatgt

SEQ ID NO: 1268 - DNA, 9 bp, artificial
  LNA Oligomer
gtcgatggt

SEQ ID NO: 1269 - DNA, 9 bp, artificial
  LNA Oligomer
aatgaatgt

SEQ ID NO: 1270 - DNA, 9 bp, artificial
  LNA Oligomer
cattgccaa

SEQ ID NO: 1271 - DNA, 9 bp, artificial
  LNA Oligomer
tctagaacc

SEQ ID NO: 1272 - DNA, 9 bp, artificial
  LNA Oligomer
gggcactgg

SEQ ID NO: 1273 - DNA, 9 bp, artificial
  LNA Oligomer
gatgatcaa

SEQ ID NO: 1274 - DNA, 9 bp, artificial
  LNA Oligomer
tactgcctc

SEQ ID NO: 1275 - DNA, 9 bp, artificial
  LNA Oligomer
cagtgccat

SEQ ID NO: 1276 - DNA, 9 bp, artificial
  LNA Oligomer
ggtaattca

SEQ ID NO: 1277 - DNA, 9 bp, artificial
  LNA Oligomer
tctccgtcc

SEQ ID NO: 1278 - DNA, 9 bp, artificial
  LNA Oligomer
tttctctcc

SEQ ID NO: 1279 - DNA, 9 bp, artificial
  LNA Oligomer
gccagcccc

SEQ ID NO: 1280 - DNA, 9 bp, artificial
  LNA Oligomer
gaattcttt

SEQ ID NO: 1281 - DNA, 9 bp, artificial
  LNA Oligomer
acctttggg

SEQ ID NO: 1282 - DNA, 9 bp, artificial
  LNA Oligomer
caagacacg

SEQ ID NO: 1283 - DNA, 9 bp, artificial
  LNA Oligomer
tgttgtagc

SEQ ID NO: 1284 - DNA, 9 bp, artificial
  LNA Oligomer
catgtggga

SEQ ID NO: 1285 - DNA, 9 bp, artificial
  LNA Oligomer
gcaagggat

SEQ ID NO: 1286 - DNA, 9 bp, artificial
  LNA Oligomer
atgcacctt

SEQ ID NO: 1287 - DNA, 9 bp, artificial
  LNA Oligomer
ttagggcag

SEQ ID NO: 1288 - DNA, 9 bp, artificial
  LNA Oligomer
atgcacctt

SEQ ID NO: 1289 - DNA, 9 bp, artificial
  LNA Oligomer
atttagggc

SEQ ID NO: 1290 - DNA, 9 bp, artificial
  LNA Oligomer
aaacatatc

SEQ ID NO: 1291 - DNA, 9 bp, artificial
  LNA Oligomer
gtccccgcc

SEQ ID NO: 1292 - DNA, 9 bp, artificial
  LNA Oligomer
ggcccctgc

SEQ ID NO: 1293 - DNA, 9 bp, artificial
  LNA Oligomer
ccggcactc

SEQ ID NO: 1294 - DNA, 9 bp, artificial
  LNA Oligomer
aaacatatc

SEQ ID NO: 1295 - DNA, 9 bp, artificial
  LNA Oligomer
gattccgtt

SEQ ID NO: 1296 - DNA, 9 bp, artificial
  LNA Oligomer
caagcgcag

SEQ ID NO: 1297 - DNA, 9 bp, artificial
  LNA Oligomer
acaggactg

SEQ ID NO: 1298 - DNA, 9 bp, artificial
  LNA Oligomer
gcggtactc

SEQ ID NO: 1299 - DNA, 9 bp, artificial
  LNA Oligomer
atgcctggt

SEQ ID NO: 1300 - DNA, 9 bp, artificial
  LNA Oligomer
gctctgggt

SEQ ID NO: 1301 - DNA, 9 bp, artificial
  LNA Oligomer
agggggcag

SEQ ID NO: 1302 - DNA, 9 bp, artificial
  LNA Oligomer
gggcacagg

SEQ ID NO: 1303 - DNA, 9 bp, artificial
  LNA Oligomer
ggacccctc

SEQ ID NO: 1304 - DNA, 9 bp, artificial
  LNA Oligomer
cgccctggg

SEQ ID NO: 1305 - DNA, 9 bp, artificial
  LNA Oligomer
aaggcaagg

SEQ ID NO: 1306 - DNA, 9 bp, artificial
  LNA Oligomer
cataggtca

SEQ ID NO: 1307 - DNA, 9 bp, artificial
  LNA Oligomer
gaattggca

SEQ ID NO: 1308 - DNA, 9 bp, artificial
  LNA Oligomer
taggccagt

SEQ ID NO: 1309 - DNA, 9 bp, artificial
  LNA Oligomer
caaagaccc

SEQ ID NO: 1310 - DNA, 9 bp, artificial
  LNA Oligomer
agggccagt

SEQ ID NO: 1311 - DNA, 9 bp, artificial
  LNA Oligomer
caaaacccc

SEQ ID NO: 1312 - DNA, 9 bp, artificial
  LNA Oligomer
tgctgttac

SEQ ID NO: 1313 - DNA, 9 bp, artificial
  LNA Oligomer
gccccactg

SEQ ID NO: 1314 - DNA, 9 bp, artificial
  LNA Oligomer
tgtgctgct

SEQ ID NO: 1315 - DNA, 9 bp, artificial
  LNA Oligomer
ccaatattg

SEQ ID NO: 1316 - DNA, 9 bp, artificial
  LNA Oligomer
aaactacct

SEQ ID NO: 1317 - DNA, 9 bp, artificial
  LNA Oligomer
cttgttgcc

SEQ ID NO: 1318 - DNA, 9 bp, artificial
  LNA Oligomer
aaactacct

SEQ ID NO: 1319 - DNA, 9 bp, artificial
  LNA Oligomer
aggtggtga

SEQ ID NO: 1320 - DNA, 9 bp, artificial
  LNA Oligomer
cctctggac

SEQ ID NO: 1321 - DNA, 9 bp, artificial
  LNA Oligomer
gaacactgg

SEQ ID NO: 1322 - DNA, 9 bp, artificial
  LNA Oligomer
agactactg

SEQ ID NO: 1323 - DNA, 9 bp, artificial
  LNA Oligomer
aaacactgg

SEQ ID NO: 1324 - DNA, 9 bp, artificial
  LNA Oligomer
gatttgcac

SEQ ID NO: 1325 - DNA, 9 bp, artificial
  LNA Oligomer
atgcaaaac

SEQ ID NO: 1326 - DNA, 9 bp, artificial
  LNA Oligomer
gatttgcac

SEQ ID NO: 1327 - DNA, 9 bp, artificial
  LNA Oligomer
ctgcaaaac

SEQ ID NO: 1328 - DNA, 9 bp, artificial
  LNA Oligomer
ctgcaaaac

SEQ ID NO: 1329 - DNA, 9 bp, artificial
  LNA Oligomer
gacagtgtt

SEQ ID NO: 1330 - DNA, 9 bp, artificial
  LNA Oligomer
cggtaagat

SEQ ID NO: 1331 - DNA, 9 bp, artificial
  LNA Oligomer
ggcagtatt

SEQ ID NO: 1332 - DNA, 9 bp, artificial
  LNA Oligomer
cagtaagat

SEQ ID NO: 1333 - DNA, 9 bp, artificial
  LNA Oligomer
ggcagtatt

SEQ ID NO: 1334 - DNA, 9 bp, artificial
  LNA Oligomer
gggtaagac

SEQ ID NO: 1335 - DNA, 9 bp, artificial
  LNA Oligomer
ctatacctc

SEQ ID NO: 1336 - DNA, 9 bp, artificial
  LNA Oligomer
tgcatagga

SEQ ID NO: 1337 - DNA, 9 bp, artificial
  LNA Oligomer
aacatttca

SEQ ID NO: 1338 - DNA, 9 bp, artificial
  LNA Oligomer
acaaaggga

SEQ ID NO: 1339 - DNA, 9 bp, artificial
  LNA Oligomer
gaatgaagg

SEQ ID NO: 1340 - DNA, 9 bp, artificial
  LNA Oligomer
ttacattcc

SEQ ID NO: 1341 - DNA, 9 bp, artificial
  LNA Oligomer
ctcgtctta

SEQ ID NO: 1342 - DNA, 9 bp, artificial
  LNA Oligomer
ttcgtctta

SEQ ID NO: 1343 - DNA, 9 bp, artificial
  LNA Oligomer
aagcacttt

SEQ ID NO: 1344 - DNA, 9 bp, artificial
  LNA Oligomer
ataatgcag

SEQ ID NO: 1345 - DNA, 9 bp, artificial
  LNA Oligomer
gagcacttt

SEQ ID NO: 1346 - DNA, 9 bp, artificial
  LNA Oligomer
atactacag

SEQ ID NO: 1347 - DNA, 9 bp, artificial
  LNA Oligomer
tgataagct

SEQ ID NO: 1348 - DNA, 9 bp, artificial
  LNA Oligomer
actggtgtt

SEQ ID NO: 1349 - DNA, 9 bp, artificial
  LNA Oligomer
acacgcaca

SEQ ID NO: 1350 - DNA, 9 bp, artificial
  LNA Oligomer
acaaaggga

SEQ ID NO: 1351 - DNA, 9 bp, artificial
  LNA Oligomer
gagactgtt

SEQ ID NO: 1352 - DNA, 9 bp, artificial
  LNA Oligomer
tgcctgctg

SEQ ID NO: 1353 - DNA, 9 bp, artificial
  LNA Oligomer
tagacaggc

SEQ ID NO: 1354 - DNA, 9 bp, artificial
  LNA Oligomer
cataggtca

SEQ ID NO: 1355 - DNA, 9 bp, artificial
  LNA Oligomer
gctgagatt

SEQ ID NO: 1356 - DNA, 9 bp, artificial
  LNA Oligomer
gcagagatt

SEQ ID NO: 1357 - DNA, 9 bp, artificial
  LNA Oligomer
tgatgcagt

SEQ ID NO: 1358 - DNA, 9 bp, artificial
  LNA Oligomer
tcaagcaca

SEQ ID NO: 1359 - DNA, 9 bp, artificial
  LNA Oligomer
acggaacca

SEQ ID NO: 1360 - DNA, 9 bp, artificial
  LNA Oligomer
cagaaccat

SEQ ID NO: 1361 - DNA, 9 bp, artificial
  LNA Oligomer
actcaactc

SEQ ID NO: 1362 - DNA, 9 bp, artificial
  LNA Oligomer
ccacaattc

SEQ ID NO: 1363 - DNA, 9 bp, artificial
  LNA Oligomer
tggacaatc

SEQ ID NO: 1364 - DNA, 9 bp, artificial
  LNA Oligomer
ctggcagct

SEQ ID NO: 1365 - DNA, 9 bp, artificial
  LNA Oligomer
ctgaagaac

SEQ ID NO: 1366 - DNA, 9 bp, artificial
  LNA Oligomer
tacggtgtg

SEQ ID NO: 1367 - DNA, 9 bp, artificial
  LNA Oligomer
acggtggtg

SEQ ID NO: 1368 - DNA, 9 bp, artificial
  LNA Oligomer
agccctgtg

SEQ ID NO: 1369 - DNA, 9 bp, artificial
  LNA Oligomer
caatgtagc

SEQ ID NO: 1370 - DNA, 9 bp, artificial
  LNA Oligomer
tatgccagg

SEQ ID NO: 1371 - DNA, 9 bp, artificial
  LNA Oligomer
agatgtagc

SEQ ID NO: 1372 - DNA, 9 bp, artificial
  LNA Oligomer
ggctactga

SEQ ID NO: 1373 - DNA, 9 bp, artificial
  LNA Oligomer
caaactgac

SEQ ID NO: 1374 - DNA, 9 bp, artificial
  LNA Oligomer
caaatacac

SEQ ID NO: 1375 - DNA, 9 bp, artificial
  LNA Oligomer
tagtgactt

SEQ ID NO: 1376 - DNA, 9 bp, artificial
  LNA Oligomer
gcaatgtga

SEQ ID NO: 1377 - DNA, 9 bp, artificial
  LNA Oligomer
caggaaccc

SEQ ID NO: 1378 - DNA, 9 bp, artificial
  LNA Oligomer
gcaatgtga

SEQ ID NO: 1379 - DNA, 9 bp, artificial
  LNA Oligomer
caggaaccc

SEQ ID NO: 1380 - DNA, 9 bp, artificial
  LNA Oligomer
aactgagcc

SEQ ID NO: 1381 - DNA, 9 bp, artificial
  LNA Oligomer
tcagtaggc

SEQ ID NO: 1382 - DNA, 9 bp, artificial
  LNA Oligomer
tcagtaggc

SEQ ID NO: 1383 - DNA, 9 bp, artificial
  LNA Oligomer
aagtgcaat

SEQ ID NO: 1384 - DNA, 9 bp, artificial
  LNA Oligomer
gtctccgcc

SEQ ID NO: 1385 - DNA, 9 bp, artificial
  LNA Oligomer
attacttga

SEQ ID NO: 1386 - DNA, 9 bp, artificial
  LNA Oligomer
caagaatag

SEQ ID NO: 1387 - DNA, 9 bp, artificial
  LNA Oligomer
caagaatag

SEQ ID NO: 1388 - DNA, 9 bp, artificial
  LNA Oligomer
attacttga

SEQ ID NO: 1389 - DNA, 9 bp, artificial
  LNA Oligomer
ggagaacag

SEQ ID NO: 1390 - DNA, 9 bp, artificial
  LNA Oligomer
ccactgtga

SEQ ID NO: 1391 - DNA, 9 bp, artificial
  LNA Oligomer
gctaagccc

SEQ ID NO: 1392 - DNA, 9 bp, artificial
  LNA Oligomer
ccactgtga

SEQ ID NO: 1393 - DNA, 9 bp, artificial
  LNA Oligomer
gctaagctc

SEQ ID NO: 1394 - DNA, 9 bp, artificial
  LNA Oligomer
caatctagt

SEQ ID NO: 1395 - DNA, 9 bp, artificial
  LNA Oligomer
tgagctcct

SEQ ID NO: 1396 - DNA, 9 bp, artificial
  LNA Oligomer
cccaaccct

SEQ ID NO: 1397 - DNA, 9 bp, artificial
  LNA Oligomer
ggggggccc

SEQ ID NO: 1398 - DNA, 9 bp, artificial
  LNA Oligomer
acacataca

SEQ ID NO: 1399 - DNA, 9 bp, artificial
  LNA Oligomer
tgcttctgc

SEQ ID NO: 1400 - DNA, 9 bp, artificial
  LNA Oligomer
atcccacat

SEQ ID NO: 1401 - DNA, 9 bp, artificial
  LNA Oligomer
cggtaaacc

SEQ ID NO: 1402 - DNA, 9 bp, artificial
  LNA Oligomer
gatggtgct

SEQ ID NO: 1403 - DNA, 9 bp, artificial
  LNA Oligomer
agaaatcag

SEQ ID NO: 1404 - DNA, 9 bp, artificial
  LNA Oligomer
aatggtgct

SEQ ID NO: 1405 - DNA, 9 bp, artificial
  LNA Oligomer
tgaaaccag

SEQ ID NO: 1406 - DNA, 9 bp, artificial
  LNA Oligomer
gtgaaacca

SEQ ID NO: 1407 - DNA, 9 bp, artificial
  LNA Oligomer
aatggtgct

SEQ ID NO: 1408 - DNA, 9 bp, artificial
  LNA Oligomer
aaatcggtc

SEQ ID NO: 1409 - DNA, 9 bp, artificial
  LNA Oligomer
cccttgtat

SEQ ID NO: 1410 - DNA, 9 bp, artificial
  LNA Oligomer
tattgcact

SEQ ID NO: 1411 - DNA, 9 bp, artificial
  LNA Oligomer
cattgcact

SEQ ID NO: 1412 - DNA, 9 bp, artificial
  LNA Oligomer
gaagcactt

SEQ ID NO: 1413 - DNA, 9 bp, artificial
  LNA Oligomer
acgtttaag

SEQ ID NO: 1414 - DNA, 9 bp, artificial
  LNA Oligomer
gaagcactt

SEQ ID NO: 1415 - DNA, 9 bp, artificial
  LNA Oligomer
atgttaaag

SEQ ID NO: 1416 - DNA, 9 bp, artificial
  LNA Oligomer
gaagcactt

SEQ ID NO: 1417 - DNA, 9 bp, artificial
  LNA Oligomer
ccatgttaa

SEQ ID NO: 1418 - DNA, 9 bp, artificial
  LNA Oligomer
gaagcactt

SEQ ID NO: 1419 - DNA, 9 bp, artificial
  LNA Oligomer
atgttaaag

SEQ ID NO: 1420 - DNA, 9 bp, artificial
  LNA Oligomer
gaagcactt

SEQ ID NO: 1421 - DNA, 9 bp, artificial
  LNA Oligomer
gaagcaatt

SEQ ID NO: 1422 - DNA, 9 bp, artificial
  LNA Oligomer
gatgtttac

SEQ ID NO: 1423 - DNA, 9 bp, artificial
  LNA Oligomer
cgactgaaa

SEQ ID NO: 1424 - DNA, 9 bp, artificial
  LNA Oligomer
gatgtttac

SEQ ID NO: 1425 - DNA, 9 bp, artificial
  LNA Oligomer
cacctccca

SEQ ID NO: 1426 - DNA, 9 bp, artificial
  LNA Oligomer
gatgtttac

SEQ ID NO: 1427 - DNA, 9 bp, artificial
  LNA Oligomer
cctctccca

SEQ ID NO: 1428 - DNA, 9 bp, artificial
  LNA Oligomer
cttctccca

SEQ ID NO: 1429 - DNA, 9 bp, artificial
  LNA Oligomer
gatgtttac

SEQ ID NO: 1430 - DNA, 9 bp, artificial
  LNA Oligomer
tgactgaaa

SEQ ID NO: 1431 - DNA, 9 bp, artificial
  LNA Oligomer
gatgtttac

SEQ ID NO: 1432 - DNA, 9 bp, artificial
  LNA Oligomer
cgactgaaa

SEQ ID NO: 1433 - DNA, 9 bp, artificial
  LNA Oligomer
catcttgcc

SEQ ID NO: 1434 - DNA, 9 bp, artificial
  LNA Oligomer
tggcatagc

SEQ ID NO: 1435 - DNA, 9 bp, artificial
  LNA Oligomer
atgtgcaat

SEQ ID NO: 1436 - DNA, 9 bp, artificial
  LNA Oligomer
cactaaatt

SEQ ID NO: 1437 - DNA, 9 bp, artificial
  LNA Oligomer
cccagcttt

SEQ ID NO: 1438 - DNA, 9 bp, artificial
  LNA Oligomer
cccagcttt

SEQ ID NO: 1439 - DNA, 9 bp, artificial
  LNA Oligomer
cccagcttt

SEQ ID NO: 1440 - DNA, 9 bp, artificial
  LNA Oligomer
cccagcttt

SEQ ID NO: 1441 - DNA, 9 bp, artificial
  LNA Oligomer
gtgtaatgt

SEQ ID NO: 1442 - DNA, 9 bp, artificial
  LNA Oligomer
cggaccacc

SEQ ID NO: 1443 - DNA, 9 bp, artificial
  LNA Oligomer
ctggggcag

SEQ ID NO: 1444 - DNA, 9 bp, artificial
  LNA Oligomer
aggggatgc

SEQ ID NO: 1445 - DNA, 9 bp, artificial
  LNA Oligomer
acctactag

SEQ ID NO: 1446 - DNA, 9 bp, artificial
  LNA Oligomer
ggcccagag

SEQ ID NO: 1447 - DNA, 9 bp, artificial
  LNA Oligomer
agagggcca

SEQ ID NO: 1448 - DNA, 9 bp, artificial
  LNA Oligomer
caggtgtgt

SEQ ID NO: 1449 - DNA, 9 bp, artificial
  LNA Oligomer
tgtgctttg

SEQ ID NO: 1450 - DNA, 9 bp, artificial
  LNA Oligomer
ggcccagag

SEQ ID NO: 1451 - DNA, 9 bp, artificial
  LNA Oligomer
gcccagggg

SEQ ID NO: 1452 - DNA, 9 bp, artificial
  LNA Oligomer
ccataccta

SEQ ID NO: 1453 - DNA, 9 bp, artificial
  LNA Oligomer
ttgctcttg

SEQ ID NO: 1454 - DNA, 9 bp, artificial
  LNA Oligomer
taatgaaaa

SEQ ID NO: 1455 - DNA, 9 bp, artificial
  LNA Oligomer
catatagga

SEQ ID NO: 1456 - DNA, 9 bp, artificial
  LNA Oligomer
gaagccgtt

SEQ ID NO: 1457 - DNA, 9 bp, artificial
  LNA Oligomer
tgatgctgg

SEQ ID NO: 1458 - DNA, 9 bp, artificial
  LNA Oligomer
ggatattgt

SEQ ID NO: 1459 - DNA, 9 bp, artificial
  LNA Oligomer
gaggcgctc

SEQ ID NO: 1460 - DNA, 9 bp, artificial
  LNA Oligomer
aggacaggg

SEQ ID NO: 1461 - DNA, 9 bp, artificial
  LNA Oligomer
tacaatgca

SEQ ID NO: 1462 - DNA, 9 bp, artificial
  LNA Oligomer
ggaaacatt

SEQ ID NO: 1463 - DNA, 9 bp, artificial
  LNA Oligomer
agcaatgca

SEQ ID NO: 1464 - DNA, 9 bp, artificial
  LNA Oligomer
cgaggcact

SEQ ID NO: 1465 - DNA, 9 bp, artificial
  LNA Oligomer
tgctttata

SEQ ID NO: 1466 - DNA, 9 bp, artificial
  LNA Oligomer
ctgagacgg

SEQ ID NO: 1467 - DNA, 9 bp, artificial
  LNA Oligomer
ctgtgtgag

SEQ ID NO: 1468 - DNA, 9 bp, artificial
  LNA Oligomer
tagcacccc

SEQ ID NO: 1469 - DNA, 9 bp, artificial
  LNA Oligomer
aggagtcag

SEQ ID NO: 1470 - DNA, 9 bp, artificial
  LNA Oligomer
cgggcagac

SEQ ID NO: 1471 - DNA, 9 bp, artificial
  LNA Oligomer
gacactgcc

SEQ ID NO: 1472 - DNA, 9 bp, artificial
  LNA Oligomer
ttgctgatt

SEQ ID NO: 1473 - DNA, 9 bp, artificial
  LNA Oligomer
ttagtgatt

SEQ ID NO: 1474 - DNA, 9 bp, artificial
  LNA Oligomer
acactgcct

SEQ ID NO: 1475 - DNA, 9 bp, artificial
  LNA Oligomer
gttagtgat

SEQ ID NO: 1476 - DNA, 9 bp, artificial
  LNA Oligomer
tacactgcc

SEQ ID NO: 1477 - DNA, 9 bp, artificial
  LNA Oligomer
acctggggg

SEQ ID NO: 1478 - DNA, 9 bp, artificial
  LNA Oligomer
attctgata

SEQ ID NO: 1479 - DNA, 9 bp, artificial
  LNA Oligomer
taggtgtgt

SEQ ID NO: 1480 - DNA, 9 bp, artificial
  LNA Oligomer
tccaaggat

SEQ ID NO: 1481 - DNA, 9 bp, artificial
  LNA Oligomer
ccgtgcaat

SEQ ID NO: 1482 - DNA, 9 bp, artificial
  LNA Oligomer
gatccaccc

SEQ ID NO: 1483 - DNA, 9 bp, artificial
  LNA Oligomer
aggggcatt

SEQ ID NO: 1484 - DNA, 9 bp, artificial
  LNA Oligomer
aagtgcaat

SEQ ID NO: 1485 - DNA, 9 bp, artificial
  LNA Oligomer
tagcaacag

SEQ ID NO: 1486 - DNA, 9 bp, artificial
  LNA Oligomer
atgtattat

SEQ ID NO: 1487 - DNA, 9 bp, artificial
  LNA Oligomer
cggtcgatc

SEQ ID NO: 1488 - DNA, 9 bp, artificial
  LNA Oligomer
cccagcagg

SEQ ID NO: 1489 - DNA, 9 bp, artificial
  LNA Oligomer
ggcggcact

SEQ ID NO: 1490 - DNA, 9 bp, artificial
  LNA Oligomer
cagtttgag

SEQ ID NO: 1491 - DNA, 9 bp, artificial
  LNA Oligomer
gcagcactt

SEQ ID NO: 1492 - DNA, 9 bp, artificial
  LNA Oligomer
gaagcactt

SEQ ID NO: 1493 - DNA, 9 bp, artificial
  LNA Oligomer
cattttgag

SEQ ID NO: 1494 - DNA, 9 bp, artificial
  LNA Oligomer
tgtattata

SEQ ID NO: 1495 - DNA, 9 bp, artificial
  LNA Oligomer
atctgataa

SEQ ID NO: 1496 - DNA, 9 bp, artificial
  LNA Oligomer
tgtattata

SEQ ID NO: 1497 - DNA, 9 bp, artificial
  LNA Oligomer
acctgctaa

SEQ ID NO: 1498 - DNA, 9 bp, artificial
  LNA Oligomer
aacgaacaa

SEQ ID NO: 1499 - DNA, 9 bp, artificial
  LNA Oligomer
cctctatga

SEQ ID NO: 1500 - DNA, 9 bp, artificial
  LNA Oligomer
gagaatcta

SEQ ID NO: 1501 - DNA, 9 bp, artificial
  LNA Oligomer
cctctatga

SEQ ID NO: 1502 - DNA, 9 bp, artificial
  LNA Oligomer
cctctatgt

SEQ ID NO: 1503 - DNA, 9 bp, artificial
  LNA Oligomer
tttgtgtga

SEQ ID NO: 1504 - DNA, 9 bp, artificial
  LNA Oligomer
ggcaacctc

SEQ ID NO: 1505 - DNA, 9 bp, artificial
  LNA Oligomer
caagtccag

SEQ ID NO: 1506 - DNA, 9 bp, artificial
  LNA Oligomer
gagtcagga

SEQ ID NO: 1507 - DNA, 9 bp, artificial
  LNA Oligomer
tagtctacc

SEQ ID NO: 1508 - DNA, 9 bp, artificial
  LNA Oligomer
atgttacat

SEQ ID NO: 1509 - DNA, 9 bp, artificial
  LNA Oligomer
atattacat

SEQ ID NO: 1510 - DNA, 9 bp, artificial
  LNA Oligomer
tggtcaacc

SEQ ID NO: 1511 - DNA, 9 bp, artificial
  LNA Oligomer
cccttgtat

SEQ ID NO: 1512 - DNA, 9 bp, artificial
  LNA Oligomer
gaacaactt

SEQ ID NO: 1513 - DNA, 9 bp, artificial
  LNA Oligomer
cttctgatc

SEQ ID NO: 1514 - DNA, 9 bp, artificial
  LNA Oligomer
ttctaggaa

SEQ ID NO: 1515 - DNA, 9 bp, artificial
  LNA Oligomer
agcaacatt

SEQ ID NO: 1516 - DNA, 9 bp, artificial
  LNA Oligomer
cgggtaacc

SEQ ID NO: 1517 - DNA, 9 bp, artificial
  LNA Oligomer
gtgttatat

SEQ ID NO: 1518 - DNA, 9 bp, artificial
  LNA Oligomer
cggtctact

SEQ ID NO: 1519 - DNA, 9 bp, artificial
  LNA Oligomer
gtgttacat

SEQ ID NO: 1520 - DNA, 9 bp, artificial
  LNA Oligomer
caggtgaag

SEQ ID NO: 1521 - DNA, 9 bp, artificial
  LNA Oligomer
gtctgttga

SEQ ID NO: 1522 - DNA, 9 bp, artificial
  LNA Oligomer
taagtccag

SEQ ID NO: 1523 - DNA, 9 bp, artificial
  LNA Oligomer
agaccgagc

SEQ ID NO: 1524 - DNA, 9 bp, artificial
  LNA Oligomer
ctgcccctc

SEQ ID NO: 1525 - DNA, 9 bp, artificial
  LNA Oligomer
attgctgct

SEQ ID NO: 1526 - DNA, 9 bp, artificial
  LNA Oligomer
tcacgtttt

SEQ ID NO: 1527 - DNA, 9 bp, artificial
  LNA Oligomer
tcgtgtcat

SEQ ID NO: 1528 - DNA, 9 bp, artificial
  LNA Oligomer
cattcccga

SEQ ID NO: 1529 - DNA, 9 bp, artificial
  LNA Oligomer
gacagtatt

SEQ ID NO: 1530 - DNA, 9 bp, artificial
  LNA Oligomer
ctgcaagac

SEQ ID NO: 1531 - DNA, 9 bp, artificial
  LNA Oligomer
agacgacct

SEQ ID NO: 1532 - DNA, 9 bp, artificial
  LNA Oligomer
tactccaag

SEQ ID NO: 1533 - DNA, 9 bp, artificial
  LNA Oligomer
agccatcca

SEQ ID NO: 1534 - DNA, 9 bp, artificial
  LNA Oligomer
ccatcatga

SEQ ID NO: 1535 - DNA, 9 bp, artificial
  LNA Oligomer
acatatgca

SEQ ID NO: 1536 - DNA, 9 bp, artificial
  LNA Oligomer
tacactgcc

SEQ ID NO: 1537 - DNA, 9 bp, artificial
  LNA Oligomer
tacactgcc

SEQ ID NO: 1538 - DNA, 9 bp, artificial
  LNA Oligomer
catcgcaaa

SEQ ID NO: 1539 - DNA, 9 bp, artificial
  LNA Oligomer
atgatccca

SEQ ID NO: 1540 - DNA, 9 bp, artificial
  LNA Oligomer
tattgcaaa

SEQ ID NO: 1541 - DNA, 9 bp, artificial
  LNA Oligomer
gtaacggtt

SEQ ID NO: 1542 - DNA, 9 bp, artificial
  LNA Oligomer
gcaaacagt

SEQ ID NO: 1543 - DNA, 9 bp, artificial
  LNA Oligomer
tgcagatga

SEQ ID NO: 1544 - DNA, 9 bp, artificial
  LNA Oligomer
cggacaacc

SEQ ID NO: 1545 - DNA, 9 bp, artificial
  LNA Oligomer
tattgcact

SEQ ID NO: 1546 - DNA, 9 bp, artificial
  LNA Oligomer
ttgataggg

SEQ ID NO: 1547 - DNA, 9 bp, artificial
  LNA Oligomer
catggactg

SEQ ID NO: 1548 - DNA, 9 bp, artificial
  LNA Oligomer
aaggcacat

SEQ ID NO: 1549 - DNA, 9 bp, artificial
  LNA Oligomer
agaggagtg

SEQ ID NO: 1550 - DNA, 9 bp, artificial
  LNA Oligomer
ctcccgtct

SEQ ID NO: 1551 - DNA, 9 bp, artificial
  LNA Oligomer
ctgagcctg

SEQ ID NO: 1552 - DNA, 9 bp, artificial
  LNA Oligomer
cgtgtatga

SEQ ID NO: 1553 - DNA, 9 bp, artificial
  LNA Oligomer
gccagcctc

SEQ ID NO: 1554 - DNA, 9 bp, artificial
  LNA Oligomer
agctgcccc

SEQ ID NO: 1555 - DNA, 9 bp, artificial
  LNA Oligomer
cagtacagg

SEQ ID NO: 1556 - DNA, 9 bp, artificial
  LNA Oligomer
ctgtatgat

SEQ ID NO: 1557 - DNA, 9 bp, artificial
  LNA Oligomer
ctgtacgat

SEQ ID NO: 1558 - DNA, 9 bp, artificial
  LNA Oligomer
agcctttca

SEQ ID NO: 1559 - DNA, 9 bp, artificial
  LNA Oligomer
attatctgg

SEQ ID NO: 1560 - DNA, 9 bp, artificial
  LNA Oligomer
gtgatgtca

SEQ ID NO: 1561 - DNA, 9 bp, artificial
  LNA Oligomer
ctccaggtt

SEQ ID NO: 1562 - DNA, 9 bp, artificial
  LNA Oligomer
agatccatg

SEQ ID NO: 1563 - DNA, 9 bp, artificial
  LNA Oligomer
cttgcataa

SEQ ID NO: 1564 - DNA, 9 bp, artificial
  LNA Oligomer
gttccccac

SEQ ID NO: 1565 - DNA, 9 bp, artificial
  LNA Oligomer
cgcaggtcc

SEQ ID NO: 1566 - DNA, 9 bp, artificial
  LNA Oligomer
tagaccttc

SEQ ID NO: 1567 - DNA, 9 bp, artificial
  LNA Oligomer
ccatgtaca

SEQ ID NO: 1568 - DNA, 9 bp, artificial
  LNA Oligomer
gtatgtttc

SEQ ID NO: 1569 - DNA, 9 bp, artificial
  LNA Oligomer
atgtttgtt

SEQ ID NO: 1570 - DNA, 9 bp, artificial
  LNA Oligomer
gtaatactc

SEQ ID NO: 1571 - DNA, 9 bp, artificial
  LNA Oligomer
tgtgctgct

SEQ ID NO: 1572 - DNA, 9 bp, artificial
  LNA Oligomer
gtgtggttt

SEQ ID NO: 1573 - DNA, 9 bp, artificial
  LNA Oligomer
tggcttgaa

SEQ ID NO: 1574 - DNA, 9 bp, artificial
  LNA Oligomer
ctgtgatgt

SEQ ID NO: 1575 - DNA, 9 bp, artificial
  LNA Oligomer
caagtctta

SEQ ID NO: 1576 - DNA, 9 bp, artificial
  LNA Oligomer
gcaaggatt

SEQ ID NO: 1577 - DNA, 9 bp, artificial
  LNA Oligomer
ccaggtgca

SEQ ID NO: 1578 - DNA, 9 bp, artificial
  LNA Oligomer
cgggtgcat

SEQ ID NO: 1579 - DNA, 9 bp, artificial
  LNA Oligomer
acaaaggat

SEQ ID NO: 1580 - DNA, 9 bp, artificial
  LNA Oligomer
caggtgcat

SEQ ID NO: 1581 - DNA, 9 bp, artificial
  LNA Oligomer
tagcaagga

SEQ ID NO: 1582 - DNA, 9 bp, artificial
  LNA Oligomer
cccgctgct

SEQ ID NO: 1583 - DNA, 9 bp, artificial
  LNA Oligomer
accagggtc

SEQ ID NO: 1584 - DNA, 9 bp, artificial
  LNA Oligomer
agtgttgac

SEQ ID NO: 1585 - DNA, 9 bp, artificial
  LNA Oligomer
cctggctcc

SEQ ID NO: 1586 - DNA, 9 bp, artificial
  LNA Oligomer
gggtgcctt

SEQ ID NO: 1587 - DNA, 9 bp, artificial
  LNA Oligomer
aggtgcaaa

SEQ ID NO: 1588 - DNA, 9 bp, artificial
  LNA Oligomer
gctacaatc

SEQ ID NO: 1589 - DNA, 9 bp, artificial
  LNA Oligomer
ctctggagt

SEQ ID NO: 1590 - DNA, 9 bp, artificial
  LNA Oligomer
gtctgcagt

SEQ ID NO: 1591 - DNA, 9 bp, artificial
  LNA Oligomer
gtaccaatc

SEQ ID NO: 1592 - DNA, 9 bp, artificial
  LNA Oligomer
gtctgcagt

SEQ ID NO: 1593 - DNA, 9 bp, artificial
  LNA Oligomer
ctcctgagt

SEQ ID NO: 1594 - DNA, 9 bp, artificial
  LNA Oligomer
caaaagaca

SEQ ID NO: 1595 - DNA, 9 bp, artificial
  LNA Oligomer
gacagcact

SEQ ID NO: 1596 - DNA, 9 bp, artificial
  LNA Oligomer
aggctgagt

SEQ ID NO: 1597 - DNA, 9 bp, artificial
  LNA Oligomer
gtgaaattt

SEQ ID NO: 1598 - DNA, 9 bp, artificial
  LNA Oligomer
tccctgtga

SEQ ID NO: 1599 - DNA, 9 bp, artificial
  LNA Oligomer
tccttgtga

SEQ ID NO: 1600 - DNA, 9 bp, artificial
  LNA Oligomer
tccttgaga

SEQ ID NO: 1601 - DNA, 9 bp, artificial
  LNA Oligomer
aagtgtcaa

SEQ ID NO: 1602 - DNA, 9 bp, artificial
  LNA Oligomer
gaaggcact

SEQ ID NO: 1603 - DNA, 9 bp, artificial
  LNA Oligomer
ttttggaga

SEQ ID NO: 1604 - DNA, 9 bp, artificial
  LNA Oligomer
aaaggaagc

SEQ ID NO: 1605 - DNA, 9 bp, artificial
  LNA Oligomer
tcctcgaga

SEQ ID NO: 1606 - DNA, 9 bp, artificial
  LNA Oligomer
acctccaga

SEQ ID NO: 1607 - DNA, 9 bp, artificial
  LNA Oligomer
catctagag

SEQ ID NO: 1608 - DNA, 9 bp, artificial
  LNA Oligomer
gatgcacga

SEQ ID NO: 1609 - DNA, 9 bp, artificial
  LNA Oligomer
ggatgcacg

SEQ ID NO: 1610 - DNA, 9 bp, artificial
  LNA Oligomer
gatgcacga

SEQ ID NO: 1611 - DNA, 9 bp, artificial
  LNA Oligomer
aagcgcttt

SEQ ID NO: 1612 - DNA, 9 bp, artificial
  LNA Oligomer
gagcgcttt

SEQ ID NO: 1613 - DNA, 9 bp, artificial
  LNA Oligomer
aagcgcttt

SEQ ID NO: 1614 - DNA, 9 bp, artificial
  LNA Oligomer
cctccagag

SEQ ID NO: 1615 - DNA, 9 bp, artificial
  LNA Oligomer
aagcgcttt

SEQ ID NO: 1616 - DNA, 9 bp, artificial
  LNA Oligomer
ccctctaga

SEQ ID NO: 1617 - DNA, 9 bp, artificial
  LNA Oligomer
gaagcgctt

SEQ ID NO: 1618 - DNA, 9 bp, artificial
  LNA Oligomer
aagcgcttt

SEQ ID NO: 1619 - DNA, 9 bp, artificial
  LNA Oligomer
ccctctaga

SEQ ID NO: 1620 - DNA, 9 bp, artificial
  LNA Oligomer
gatgcactt

SEQ ID NO: 1621 - DNA, 9 bp, artificial
  LNA Oligomer
ccctctaga

SEQ ID NO: 1622 - DNA, 9 bp, artificial
  LNA Oligomer
gatgcactt

SEQ ID NO: 1623 - DNA, 9 bp, artificial
  LNA Oligomer
gatgcactt

SEQ ID NO: 1624 - DNA, 9 bp, artificial
  LNA Oligomer
aggcacttt

SEQ ID NO: 1625 - DNA, 9 bp, artificial
  LNA Oligomer
ggaggcact

SEQ ID NO: 1626 - DNA, 9 bp, artificial
  LNA Oligomer
ttttggaga

SEQ ID NO: 1627 - DNA, 9 bp, artificial
  LNA Oligomer
gaagcactt

SEQ ID NO: 1628 - DNA, 9 bp, artificial
  LNA Oligomer
ccctctgga

SEQ ID NO: 1629 - DNA, 9 bp, artificial
  LNA Oligomer
gaagcactt

SEQ ID NO: 1630 - DNA, 9 bp, artificial
  LNA Oligomer
gaagcactt

SEQ ID NO: 1631 - DNA, 9 bp, artificial
  LNA Oligomer
gaagcactt

SEQ ID NO: 1632 - DNA, 9 bp, artificial
  LNA Oligomer
ccctttgta

SEQ ID NO: 1633 - DNA, 9 bp, artificial
  LNA Oligomer
gaagcactt

SEQ ID NO: 1634 - DNA, 9 bp, artificial
  LNA Oligomer
ggaagcact

SEQ ID NO: 1635 - DNA, 9 bp, artificial
  LNA Oligomer
agcactttg

SEQ ID NO: 1636 - DNA, 9 bp, artificial
  LNA Oligomer
agcactttg

SEQ ID NO: 1637 - DNA, 9 bp, artificial
  LNA Oligomer
gaagtgcgt

SEQ ID NO: 1638 - DNA, 9 bp, artificial
  LNA Oligomer
gaaccattt

SEQ ID NO: 1639 - DNA, 9 bp, artificial
  LNA Oligomer
aagcgcgtt

SEQ ID NO: 1640 - DNA, 9 bp, artificial
  LNA Oligomer
aagcgcctt

SEQ ID NO: 1641 - DNA, 9 bp, artificial
  LNA Oligomer
ccctttgta

SEQ ID NO: 1642 - DNA, 9 bp, artificial
  LNA Oligomer
aagcgcctt

SEQ ID NO: 1643 - DNA, 9 bp, artificial
  LNA Oligomer
ccctctgga

SEQ ID NO: 1644 - DNA, 9 bp, artificial
  LNA Oligomer
ccctcaaga

SEQ ID NO: 1645 - DNA, 9 bp, artificial
  LNA Oligomer
aagcacttt

SEQ ID NO: 1646 - DNA, 9 bp, artificial
  LNA Oligomer
ccctttgca

SEQ ID NO: 1647 - DNA, 9 bp, artificial
  LNA Oligomer
gtgtgggag

SEQ ID NO: 1648 - DNA, 9 bp, artificial
  LNA Oligomer
tcaaggcat

SEQ ID NO: 1649 - DNA, 9 bp, artificial
  LNA Oligomer
taatttctc

SEQ ID NO: 1650 - DNA, 9 bp, artificial
  LNA Oligomer
gtgcccacc

SEQ ID NO: 1651 - DNA, 9 bp, artificial
  LNA Oligomer
agaatcctt

SEQ ID NO: 1652 - DNA, 9 bp, artificial
  LNA Oligomer
atctgtcac

SEQ ID NO: 1653 - DNA, 9 bp, artificial
  LNA Oligomer
tgatccccg

SEQ ID NO: 1654 - DNA, 9 bp, artificial
  LNA Oligomer
gcgaatgtt

SEQ ID NO: 1655 - DNA, 9 bp, artificial
  LNA Oligomer
aatgcagaa

SEQ ID NO: 1656 - DNA, 9 bp, artificial
  LNA Oligomer
tgtttgctg

SEQ ID NO: 1657 - DNA, 9 bp, artificial
  LNA Oligomer
catttactg

SEQ ID NO: 1658 - DNA, 9 bp, artificial
  LNA Oligomer
gccagtttt

SEQ ID NO: 1659 - DNA, 9 bp, artificial
  LNA Oligomer
aattacttt

SEQ ID NO: 1660 - DNA, 9 bp, artificial
  LNA Oligomer
gaggttctt

SEQ ID NO: 1661 - DNA, 9 bp, artificial
  LNA Oligomer
aattacttt

SEQ ID NO: 1662 - DNA, 9 bp, artificial
  LNA Oligomer
gagattttt

SEQ ID NO: 1663 - DNA, 9 bp, artificial
  LNA Oligomer
aattacttt

SEQ ID NO: 1664 - DNA, 9 bp, artificial
  LNA Oligomer
gtggttttt

SEQ ID NO: 1665 - DNA, 9 bp, artificial
  LNA Oligomer
aattacttt

SEQ ID NO: 1666 - DNA, 9 bp, artificial
  LNA Oligomer
ctcagtttt

SEQ ID NO: 1667 - DNA, 9 bp, artificial
  LNA Oligomer
tacagtttt

SEQ ID NO: 1668 - DNA, 9 bp, artificial
  LNA Oligomer
ttacagttt

SEQ ID NO: 1669 - DNA, 9 bp, artificial
  LNA Oligomer
gattacttt

SEQ ID NO: 1670 - DNA, 9 bp, artificial
  LNA Oligomer
aattacttt

SEQ ID NO: 1671 - DNA, 9 bp, artificial
  LNA Oligomer
aattacttt

SEQ ID NO: 1672 - DNA, 9 bp, artificial
  LNA Oligomer
aagtacttt

SEQ ID NO: 1673 - DNA, 9 bp, artificial
  LNA Oligomer
aaatacttt

SEQ ID NO: 1674 - DNA, 9 bp, artificial
  LNA Oligomer
aataccttt

SEQ ID NO: 1675 - DNA, 9 bp, artificial
  LNA Oligomer
attactttt

SEQ ID NO: 1676 - DNA, 9 bp, artificial
  LNA Oligomer
gcagttttg

SEQ ID NO: 1677 - DNA, 9 bp, artificial
  LNA Oligomer
gtttttgct

SEQ ID NO: 1678 - DNA, 9 bp, artificial
  LNA Oligomer
atagttgtc

SEQ ID NO: 1679 - DNA, 9 bp, artificial
  LNA Oligomer
ctcaggcac

SEQ ID NO: 1680 - DNA, 9 bp, artificial
  LNA Oligomer
gagtaagac

SEQ ID NO: 1681 - DNA, 9 bp, artificial
  LNA Oligomer
agtgggtcg

SEQ ID NO: 1682 - DNA, 9 bp, artificial
  LNA Oligomer
tatgggtcg

SEQ ID NO: 1683 - DNA, 9 bp, artificial
  LNA Oligomer
gcttgattt

SEQ ID NO: 1684 - DNA, 9 bp, artificial
  LNA Oligomer
gtcacctgt

SEQ ID NO: 1685 - DNA, 9 bp, artificial
  LNA Oligomer
tcaccgttt

SEQ ID NO: 1686 - DNA, 9 bp, artificial
  LNA Oligomer
caggactag

SEQ ID NO: 1687 - DNA, 9 bp, artificial
  LNA Oligomer
agcttaccc

SEQ ID NO: 1688 - DNA, 9 bp, artificial
  LNA Oligomer
atggtaata

SEQ ID NO: 1689 - DNA, 9 bp, artificial
  LNA Oligomer
tgagctcat

SEQ ID NO: 1690 - DNA, 9 bp, artificial
  LNA Oligomer
ccgtgcaaa

SEQ ID NO: 1691 - DNA, 9 bp, artificial
  LNA Oligomer
cagcagctc

SEQ ID NO: 1692 - DNA, 9 bp, artificial
  LNA Oligomer
atttacttt

SEQ ID NO: 1693 - DNA, 9 bp, artificial
  LNA Oligomer
ttaaacttt

SEQ ID NO: 1694 - DNA, 9 bp, artificial
  LNA Oligomer
cagctactt

SEQ ID NO: 1695 - DNA, 9 bp, artificial
  LNA Oligomer
atgtcaacc

SEQ ID NO: 1696 - DNA, 9 bp, artificial
  LNA Oligomer
caccgtgcc

SEQ ID NO: 1697 - DNA, 9 bp, artificial
  LNA Oligomer
acaggcgcc

SEQ ID NO: 1698 - DNA, 9 bp, artificial
  LNA Oligomer
agaacatac

SEQ ID NO: 1699 - DNA, 9 bp, artificial
  LNA Oligomer
atttataca

SEQ ID NO: 1700 - DNA, 9 bp, artificial
  LNA Oligomer
ttcattaac

SEQ ID NO: 1701 - DNA, 9 bp, artificial
  LNA Oligomer
gctgttttc

SEQ ID NO: 1702 - DNA, 9 bp, artificial
  LNA Oligomer
ggccaactc

SEQ ID NO: 1703 - DNA, 9 bp, artificial
  LNA Oligomer
ccgagcgga

SEQ ID NO: 1704 - DNA, 9 bp, artificial
  LNA Oligomer
atcacttca

SEQ ID NO: 1705 - DNA, 9 bp, artificial
  LNA Oligomer
catgagcgt

SEQ ID NO: 1706 - DNA, 9 bp, artificial
  LNA Oligomer
cacacactc

SEQ ID NO: 1707 - DNA, 9 bp, artificial
  LNA Oligomer
caactggct

SEQ ID NO: 1708 - DNA, 9 bp, artificial
  LNA Oligomer
tccacatct

SEQ ID NO: 1709 - DNA, 9 bp, artificial
  LNA Oligomer
aaattagaa

SEQ ID NO: 1710 - DNA, 9 bp, artificial
  LNA Oligomer
attttatct

SEQ ID NO: 1711 - DNA, 9 bp, artificial
  LNA Oligomer
gcacaagaa

SEQ ID NO: 1712 - DNA, 9 bp, artificial
  LNA Oligomer
accaaatga

SEQ ID NO: 1713 - DNA, 9 bp, artificial
  LNA Oligomer
tcattctca

SEQ ID NO: 1714 - DNA, 9 bp, artificial
  LNA Oligomer
gaacacaag

SEQ ID NO: 1715 - DNA, 9 bp, artificial
  LNA Oligomer
caaccagtt

SEQ ID NO: 1716 - DNA, 9 bp, artificial
  LNA Oligomer
acaactgta

SEQ ID NO: 1717 - DNA, 9 bp, artificial
  LNA Oligomer
ttcctcttt

SEQ ID NO: 1718 - DNA, 9 bp, artificial
  LNA Oligomer
caaaccata

SEQ ID NO: 1719 - DNA, 9 bp, artificial
  LNA Oligomer
gatacgccc

SEQ ID NO: 1720 - DNA, 9 bp, artificial
  LNA Oligomer
acaatgcat

SEQ ID NO: 1721 - DNA, 9 bp, artificial
  LNA Oligomer
cctatggaa

SEQ ID NO: 1722 - DNA, 9 bp, artificial
  LNA Oligomer
ttgtggcca

SEQ ID NO: 1723 - DNA, 9 bp, artificial
  LNA Oligomer
gtggttctc

SEQ ID NO: 1724 - DNA, 9 bp, artificial
  LNA Oligomer
tttgttctg

SEQ ID NO: 1725 - DNA, 9 bp, artificial
  LNA Oligomer
cataaaatt

SEQ ID NO: 1726 - DNA, 9 bp, artificial
  LNA Oligomer
gaataagct

SEQ ID NO: 1727 - DNA, 9 bp, artificial
  LNA Oligomer
cccatggtc

SEQ ID NO: 1728 - DNA, 9 bp, artificial
  LNA Oligomer
attgacaca

SEQ ID NO: 1729 - DNA, 9 bp, artificial
  LNA Oligomer
agcagagac

SEQ ID NO: 1730 - DNA, 9 bp, artificial
  LNA Oligomer
gctggtgcc

SEQ ID NO: 1731 - DNA, 9 bp, artificial
  LNA Oligomer
ggcacactt

SEQ ID NO: 1732 - DNA, 9 bp, artificial
  LNA Oligomer
gggcaggct

SEQ ID NO: 1733 - DNA, 9 bp, artificial
  LNA Oligomer
gagtgacac

SEQ ID NO: 1734 - DNA, 9 bp, artificial
  LNA Oligomer
cgatgacgt

SEQ ID NO: 1735 - DNA, 9 bp, artificial
  LNA Oligomer
ctgacacaa

SEQ ID NO: 1736 - DNA, 9 bp, artificial
  LNA Oligomer
gtctgtaag

SEQ ID NO: 1737 - DNA, 9 bp, artificial
  LNA Oligomer
tcctagacc

SEQ ID NO: 1738 - DNA, 9 bp, artificial
  LNA Oligomer
cgcccgtgt

SEQ ID NO: 1739 - DNA, 9 bp, artificial
  LNA Oligomer
gcagtgtgt

SEQ ID NO: 1740 - DNA, 9 bp, artificial
  LNA Oligomer
tccgcagcc

SEQ ID NO: 1741 - DNA, 9 bp, artificial
  LNA Oligomer
atgggattt

SEQ ID NO: 1742 - DNA, 9 bp, artificial
  LNA Oligomer
tcagtagtt

SEQ ID NO: 1743 - DNA, 9 bp, artificial
  LNA Oligomer
ggatttgaa

SEQ ID NO: 1744 - DNA, 9 bp, artificial
  LNA Oligomer
caccacccc

SEQ ID NO: 1745 - DNA, 9 bp, artificial
  LNA Oligomer
gaaacaccc

SEQ ID NO: 1746 - DNA, 9 bp, artificial
  LNA Oligomer
atttagctc

SEQ ID NO: 1747 - DNA, 9 bp, artificial
  LNA Oligomer
gggtcctcg

SEQ ID NO: 1748 - DNA, 9 bp, artificial
  LNA Oligomer
cctgcccag

SEQ ID NO: 1749 - DNA, 9 bp, artificial
  LNA Oligomer
gaacattcc

SEQ ID NO: 1750 - DNA, 9 bp, artificial
  LNA Oligomer
acaggcgtt

SEQ ID NO: 1751 - DNA, 9 bp, artificial
  LNA Oligomer
caggctcgg

SEQ ID NO: 1752 - DNA, 9 bp, artificial
  LNA Oligomer
ggggacccc

SEQ ID NO: 1753 - DNA, 9 bp, artificial
  LNA Oligomer
tccaatgac

SEQ ID NO: 1754 - DNA, 9 bp, artificial
  LNA Oligomer
ggttttgag

SEQ ID NO: 1755 - DNA, 9 bp, artificial
  LNA Oligomer
tgggaagtc

SEQ ID NO: 1756 - DNA, 9 bp, artificial
  LNA Oligomer
agtagagtt

SEQ ID NO: 1757 - DNA, 9 bp, artificial
  LNA Oligomer
tgtccaggt

SEQ ID NO: 1758 - DNA, 9 bp, artificial
  LNA Oligomer
ctatctcca

SEQ ID NO: 1759 - DNA, 9 bp, artificial
  LNA Oligomer
gttgctagc

SEQ ID NO: 1760 - DNA, 9 bp, artificial
  LNA Oligomer
agcagactg

SEQ ID NO: 1761 - DNA, 9 bp, artificial
  LNA Oligomer
tgcaaggga

SEQ ID NO: 1762 - DNA, 9 bp, artificial
  LNA Oligomer
ataccttgt

SEQ ID NO: 1763 - DNA, 9 bp, artificial
  LNA Oligomer
actggtact

SEQ ID NO: 1764 - DNA, 9 bp, artificial
  LNA Oligomer
ctttccccc

SEQ ID NO: 1765 - DNA, 9 bp, artificial
  LNA Oligomer
ttctatagt

SEQ ID NO: 1766 - DNA, 9 bp, artificial
  LNA Oligomer
tcagacagc

SEQ ID NO: 1767 - DNA, 9 bp, artificial
  LNA Oligomer
agagactca

SEQ ID NO: 1768 - DNA, 9 bp, artificial
  LNA Oligomer
tcttactag

SEQ ID NO: 1769 - DNA, 9 bp, artificial
  LNA Oligomer
atgtcagca

SEQ ID NO: 1770 - DNA, 9 bp, artificial
  LNA Oligomer
cgtaaaccc

SEQ ID NO: 1771 - DNA, 9 bp, artificial
  LNA Oligomer
ttgggagaa

SEQ ID NO: 1772 - DNA, 9 bp, artificial
  LNA Oligomer
acagaatac

SEQ ID NO: 1773 - DNA, 9 bp, artificial
  LNA Oligomer
ggccaggtc

SEQ ID NO: 1774 - DNA, 9 bp, artificial
  LNA Oligomer
aagcagaca

SEQ ID NO: 1775 - DNA, 9 bp, artificial
  LNA Oligomer
atactatta

SEQ ID NO: 1776 - DNA, 9 bp, artificial
  LNA Oligomer
ggtgctggt

SEQ ID NO: 1777 - DNA, 9 bp, artificial
  LNA Oligomer
gtgcccaag

SEQ ID NO: 1778 - DNA, 9 bp, artificial
  LNA Oligomer
agcaagcac

SEQ ID NO: 1779 - DNA, 9 bp, artificial
  LNA Oligomer
agcccccag

SEQ ID NO: 1780 - DNA, 9 bp, artificial
  LNA Oligomer
cgcgatccc

SEQ ID NO: 1781 - DNA, 9 bp, artificial
  LNA Oligomer
ccgcagcga

SEQ ID NO: 1782 - DNA, 9 bp, artificial
  LNA Oligomer
cctggatca

SEQ ID NO: 1783 - DNA, 9 bp, artificial
  LNA Oligomer
ctatgtctt

SEQ ID NO: 1784 - DNA, 9 bp, artificial
  LNA Oligomer
ggagaggga

SEQ ID NO: 1785 - DNA, 9 bp, artificial
  LNA Oligomer
gcatacaag

SEQ ID NO: 1786 - DNA, 9 bp, artificial
  LNA Oligomer
aagccacac

SEQ ID NO: 1787 - DNA, 9 bp, artificial
  LNA Oligomer
ccagcctag

SEQ ID NO: 1788 - DNA, 9 bp, artificial
  LNA Oligomer
gcagctgct

SEQ ID NO: 1789 - DNA, 9 bp, artificial
  LNA Oligomer
gtgcagcca

SEQ ID NO: 1790 - DNA, 9 bp, artificial
  LNA Oligomer
ctgcacact

SEQ ID NO: 1791 - DNA, 9 bp, artificial
  LNA Oligomer
acacaggtt

SEQ ID NO: 1792 - DNA, 9 bp, artificial
  LNA Oligomer
gctgcctcc

SEQ ID NO: 1793 - DNA, 9 bp, artificial
  LNA Oligomer
ttatcctaa

SEQ ID NO: 1794 - DNA, 9 bp, artificial
  LNA Oligomer
tggcgccat

SEQ ID NO: 1795 - DNA, 9 bp, artificial
  LNA Oligomer
gtttcaaca

SEQ ID NO: 1796 - DNA, 9 bp, artificial
  LNA Oligomer
agcagacat

SEQ ID NO: 1797 - DNA, 9 bp, artificial
  LNA Oligomer
cggcccacc

SEQ ID NO: 1798 - DNA, 9 bp, artificial
  LNA Oligomer
catgtatta

SEQ ID NO: 1799 - DNA, 9 bp, artificial
  LNA Oligomer
gtataatat

SEQ ID NO: 1800 - DNA, 9 bp, artificial
  LNA Oligomer
agaacctgc

SEQ ID NO: 1801 - DNA, 9 bp, artificial
  LNA Oligomer
tccctccgc

SEQ ID NO: 1802 - DNA, 9 bp, artificial
  LNA Oligomer
ctgaaccaa

SEQ ID NO: 1803 - DNA, 9 bp, artificial
  LNA Oligomer
gcaatgggt

SEQ ID NO: 1804 - DNA, 9 bp, artificial
  LNA Oligomer
gacccaggc

SEQ ID NO: 1805 - DNA, 9 bp, artificial
  LNA Oligomer
caacgtggg

SEQ ID NO: 1806 - DNA, 9 bp, artificial
  LNA Oligomer
cgccccgcc

SEQ ID NO: 1807 - DNA, 9 bp, artificial
  LNA Oligomer
ccgggccac

SEQ ID NO: 1808 - DNA, 9 bp, artificial
  LNA Oligomer
taaatgaat

SEQ ID NO: 1809 - DNA, 9 bp, artificial
  LNA Oligomer
cctagccag

SEQ ID NO: 1810 - DNA, 9 bp, artificial
  LNA Oligomer
gcctcctgg

SEQ ID NO: 1811 - DNA, 9 bp, artificial
  LNA Oligomer
ccgagtgac

SEQ ID NO: 1812 - DNA, 9 bp, artificial
  LNA Oligomer
gagaaccgg

SEQ ID NO: 1813 - DNA, 9 bp, artificial
  LNA Oligomer
agggcttcc

SEQ ID NO: 1814 - DNA, 9 bp, artificial
  LNA Oligomer
ctccgcacc

SEQ ID NO: 1815 - DNA, 9 bp, artificial
  LNA Oligomer
gggcataca

SEQ ID NO: 1816 - DNA, 9 bp, artificial
  LNA Oligomer
tagtcttcc

SEQ ID NO: 1817 - DNA, 9 bp, artificial
  LNA Oligomer
tgatttgtt

SEQ ID NO: 1818 - DNA, 9 bp, artificial
  LNA Oligomer
ggatttgtt

SEQ ID NO: 1819 - DNA, 9 bp, artificial
  LNA Oligomer
taagctcct

SEQ ID NO: 1820 - DNA, 9 bp, artificial
  LNA Oligomer
agtctagtt

SEQ ID NO: 1821 - DNA, 9 bp, artificial
  LNA Oligomer
cccagcgag

SEQ ID NO: 1822 - DNA, 9 bp, artificial
  LNA Oligomer
tagccccgc

SEQ ID NO: 1823 - DNA, 9 bp, artificial
  LNA Oligomer
gtggcaaca

SEQ ID NO: 1824 - DNA, 9 bp, artificial
  LNA Oligomer
aggtcacaa

SEQ ID NO: 1825 - DNA, 9 bp, artificial
  LNA Oligomer
cccagagcc

SEQ ID NO: 1826 - DNA, 9 bp, artificial
  LNA Oligomer
ttctcctcc

SEQ ID NO: 1827 - DNA, 9 bp, artificial
  LNA Oligomer
gggctggag

SEQ ID NO: 1828 - DNA, 9 bp, artificial
  LNA Oligomer
tatgagcag

SEQ ID NO: 1829 - DNA, 9 bp, artificial
  LNA Oligomer
ccatggtgc

SEQ ID NO: 1830 - DNA, 9 bp, artificial
  LNA Oligomer
gagatccca

SEQ ID NO: 1831 - DNA, 9 bp, artificial
  LNA Oligomer
agaggtctc

SEQ ID NO: 1832 - DNA, 9 bp, artificial
  LNA Oligomer
tggtactgg

SEQ ID NO: 1833 - DNA, 9 bp, artificial
  LNA Oligomer
tttgttact

SEQ ID NO: 1834 - DNA, 9 bp, artificial
  LNA Oligomer
aagttcctg

SEQ ID NO: 1835 - DNA, 9 bp, artificial
  LNA Oligomer
gccagggca

SEQ ID NO: 1836 - DNA, 9 bp, artificial
  LNA Oligomer
tgtttccag

SEQ ID NO: 1837 - DNA, 9 bp, artificial
  LNA Oligomer
ctgaggtat

SEQ ID NO: 1838 - DNA, 9 bp, artificial
  LNA Oligomer
taaaccacc

SEQ ID NO: 1839 - DNA, 9 bp, artificial
  LNA Oligomer
aagaaatcc

SEQ ID NO: 1840 - DNA, 9 bp, artificial
  LNA Oligomer
tctcctcta

SEQ ID NO: 1841 - DNA, 9 bp, artificial
  LNA Oligomer
gagaagagg

SEQ ID NO: 1842 - DNA, 9 bp, artificial
  LNA Oligomer
cccgctgcc

SEQ ID NO: 1843 - DNA, 9 bp, artificial
  LNA Oligomer
gtgtaatgg

SEQ ID NO: 1844 - DNA, 9 bp, artificial
  LNA Oligomer
agcacccgc

SEQ ID NO: 1845 - DNA, 9 bp, artificial
  LNA Oligomer
ctccgaccc

SEQ ID NO: 1846 - DNA, 9 bp, artificial
  LNA Oligomer
gcccgttca

SEQ ID NO: 1847 - DNA, 9 bp, artificial
  LNA Oligomer
tttttgagt

SEQ ID NO: 1848 - DNA, 9 bp, artificial
  LNA Oligomer
ggtgtcagt

SEQ ID NO: 1849 - DNA, 9 bp, artificial
  LNA Oligomer
ccgatatta

SEQ ID NO: 1850 - DNA, 9 bp, artificial
  LNA Oligomer
tttccaagt

SEQ ID NO: 1851 - DNA, 9 bp, artificial
  LNA Oligomer
gttcgttgc

SEQ ID NO: 1852 - DNA, 9 bp, artificial
  LNA Oligomer
gtaagttgc

SEQ ID NO: 1853 - DNA, 9 bp, artificial
  LNA Oligomer
ggacacagt

SEQ ID NO: 1854 - DNA, 9 bp, artificial
  LNA Oligomer
ggagccagt

SEQ ID NO: 1855 - DNA, 9 bp, artificial
  LNA Oligomer
taaccaaag

SEQ ID NO: 1856 - DNA, 9 bp, artificial
  LNA Oligomer
ctagcttta

SEQ ID NO: 1857 - DNA, 9 bp, artificial
  LNA Oligomer
acagctccc

SEQ ID NO: 1858 - DNA, 9 bp, artificial
  LNA Oligomer
ccctcacta

SEQ ID NO: 1859 - DNA, 9 bp, artificial
  LNA Oligomer
tctctgctg

SEQ ID NO: 1860 - DNA, 9 bp, artificial
  LNA Oligomer
ctccgctga

SEQ ID NO: 1861 - DNA, 9 bp, artificial
  LNA Oligomer
acaagactc

SEQ ID NO: 1862 - DNA, 9 bp, artificial
  LNA Oligomer
aagtgcaat

SEQ ID NO: 1863 - DNA, 9 bp, artificial
  LNA Oligomer
atcccaacc

SEQ ID NO: 1864 - DNA, 9 bp, artificial
  LNA Oligomer
atccccacc

SEQ ID NO: 1865 - DNA, 9 bp, artificial
  LNA Oligomer
gagtgcaat

SEQ ID NO: 1866 - DNA, 9 bp, artificial
  LNA Oligomer
tcccgtccc

SEQ ID NO: 1867 - DNA, 9 bp, artificial
  LNA Oligomer
cagcacttt

SEQ ID NO: 1868 - DNA, 9 bp, artificial
  LNA Oligomer
gctcagcag

SEQ ID NO: 1869 - DNA, 9 bp, artificial
  LNA Oligomer
cctgcgcac

SEQ ID NO: 1870 - DNA, 9 bp, artificial
  LNA Oligomer
gtagtagac

SEQ ID NO: 1871 - DNA, 9 bp, artificial
  LNA Oligomer
cggtaactg

SEQ ID NO: 1872 - DNA, 9 bp, artificial
  LNA Oligomer
cctctactg

SEQ ID NO: 1873 - DNA, 9 bp, artificial
  LNA Oligomer
gagcgcgga

SEQ ID NO: 1874 - DNA, 9 bp, artificial
  LNA Oligomer
tttaagggc

SEQ ID NO: 1875 - DNA, 9 bp, artificial
  LNA Oligomer
cagctcccc

SEQ ID NO: 1876 - DNA, 9 bp, artificial
  LNA Oligomer
gccctgcct

SEQ ID NO: 1877 - DNA, 9 bp, artificial
  LNA Oligomer
cagccgggt

SEQ ID NO: 1878 - DNA, 9 bp, artificial
  LNA Oligomer
acagagaag

SEQ ID NO: 1879 - DNA, 9 bp, artificial
  LNA Oligomer
caacagtca

SEQ ID NO: 1880 - DNA, 9 bp, artificial
  LNA Oligomer
acaataatt

SEQ ID NO: 1881 - DNA, 9 bp, artificial
  LNA Oligomer
acccgttga

SEQ ID NO: 1882 - DNA, 9 bp, artificial
  LNA Oligomer
tagtgccaa

SEQ ID NO: 1883 - DNA, 9 bp, artificial
  LNA Oligomer
gcacatgat

SEQ ID NO: 1884 - DNA, 9 bp, artificial
  LNA Oligomer
tactacctc

SEQ ID NO: 1885 - DNA, 9 bp, artificial
  LNA Oligomer
tctacgggt

SEQ ID NO: 1886 - DNA, 9 bp, artificial
  LNA Oligomer
agcgagctt

SEQ ID NO: 1887 - DNA, 9 bp, artificial
  LNA Oligomer
tctacgggt

SEQ ID NO: 1888 - DNA, 9 bp, artificial
  LNA Oligomer
cacgagctt

SEQ ID NO: 1889 - DNA, 9 bp, artificial
  LNA Oligomer
cgtccttcc

SEQ ID NO: 1890 - DNA, 9 bp, artificial
  LNA Oligomer
ctggctcag

SEQ ID NO: 1891 - DNA, 9 bp, artificial
  LNA Oligomer
gcgcgtgcg

SEQ ID NO: 1892 - DNA, 9 bp, artificial
  LNA Oligomer
acagtccca

SEQ ID NO: 1893 - DNA, 9 bp, artificial
  LNA Oligomer
gacaggcaa

SEQ ID NO: 1894 - DNA, 9 bp, artificial
  LNA Oligomer
aaactctac

SEQ ID NO: 1895 - DNA, 9 bp, artificial
  LNA Oligomer
gatctctga

SEQ ID NO: 1896 - DNA, 9 bp, artificial
  LNA Oligomer
acgggaagt

SEQ ID NO: 1897 - DNA, 9 bp, artificial
  LNA Oligomer
ttcctgtaa

SEQ ID NO: 1898 - DNA, 9 bp, artificial
  LNA Oligomer
gacaacact

SEQ ID NO: 1899 - DNA, 9 bp, artificial
  LNA Oligomer
gacaacacc

SEQ ID NO: 1900 - DNA, 9 bp, artificial
  LNA Oligomer
taagcatta

SEQ ID NO: 1901 - DNA, 9 bp, artificial
  LNA Oligomer
gtggcctgg

SEQ ID NO: 1902 - DNA, 9 bp, artificial
  LNA Oligomer
gactacagt

SEQ ID NO: 1903 - DNA, 9 bp, artificial
  LNA Oligomer
cagaatgtg

SEQ ID NO: 1904 - DNA, 9 bp, artificial
  LNA Oligomer
gtgaccgcg

SEQ ID NO: 1905 - DNA, 9 bp, artificial
  LNA Oligomer
cagtattct

SEQ ID NO: 1906 - DNA, 9 bp, artificial
  LNA Oligomer
cggtttagc

SEQ ID NO: 1907 - DNA, 9 bp, artificial
  LNA Oligomer
aggcatcct

SEQ ID NO: 1908 - DNA, 9 bp, artificial
  LNA Oligomer
aaaaccatc

SEQ ID NO: 1909 - DNA, 9 bp, artificial
  LNA Oligomer
gtgctgctg

SEQ ID NO: 1910 - DNA, 9 bp, artificial
  LNA Oligomer
catgggatc

SEQ ID NO: 1911 - DNA, 9 bp, artificial
  LNA Oligomer
gtcgcgcct

SEQ ID NO: 1912 - DNA, 9 bp, artificial
  LNA Oligomer
gtataccca

SEQ ID NO: 1913 - DNA, 9 bp, artificial
  LNA Oligomer
gcagctggg

SEQ ID NO: 1914 - DNA, 8 bp, artificial
  LNA Oligomer
gcggtgct

SEQ ID NO: 1915 - DNA, 8 bp, artificial
  LNA Oligomer
ccactaag

SEQ ID NO: 1916 - DNA, 8 bp, artificial
  LNA Oligomer
ggttatgt

SEQ ID NO: 1917 - DNA, 8 bp, artificial
  LNA Oligomer
agaggtgg

SEQ ID NO: 1918 - DNA, 8 bp, artificial
  LNA Oligomer
ggtgtgcg

SEQ ID NO: 1919 - DNA, 8 bp, artificial
  LNA Oligomer
actgtctg

SEQ ID NO: 1920 - DNA, 8 bp, artificial
  LNA Oligomer
accacagg

SEQ ID NO: 1921 - DNA, 8 bp, artificial
  LNA Oligomer
caagttac

SEQ ID NO: 1922 - DNA, 8 bp, artificial
  LNA Oligomer
gagccggt

SEQ ID NO: 1923 - DNA, 8 bp, artificial
  LNA Oligomer
cagcattt

SEQ ID NO: 1924 - DNA, 8 bp, artificial
  LNA Oligomer
cgtagggt

SEQ ID NO: 1925 - DNA, 8 bp, artificial
  LNA Oligomer
accactga

SEQ ID NO: 1926 - DNA, 8 bp, artificial
  LNA Oligomer
tctatcta

SEQ ID NO: 1927 - DNA, 8 bp, artificial
  LNA Oligomer
aggcatac

SEQ ID NO: 1928 - DNA, 8 bp, artificial
  LNA Oligomer
gtcctctt

SEQ ID NO: 1929 - DNA, 8 bp, artificial
  LNA Oligomer
cttccgat

SEQ ID NO: 1930 - DNA, 8 bp, artificial
  LNA Oligomer
cgaacttg

SEQ ID NO: 1931 - DNA, 8 bp, artificial
  LNA Oligomer
caaacaaa

SEQ ID NO: 1932 - DNA, 8 bp, artificial
  LNA Oligomer
ggggaatg

SEQ ID NO: 1933 - DNA, 8 bp, artificial
  LNA Oligomer
tcgctcct

SEQ ID NO: 1934 - DNA, 8 bp, artificial
  LNA Oligomer
cagaaaat

SEQ ID NO: 1935 - DNA, 8 bp, artificial
  LNA Oligomer
gccttcat

SEQ ID NO: 1936 - DNA, 8 bp, artificial
  LNA Oligomer
tgcctgct

SEQ ID NO: 1937 - DNA, 8 bp, artificial
  LNA Oligomer
agtggtgc

SEQ ID NO: 1938 - DNA, 8 bp, artificial
  LNA Oligomer
acactagg

SEQ ID NO: 1939 - DNA, 8 bp, artificial
  LNA Oligomer
catcaggt

SEQ ID NO: 1940 - DNA, 8 bp, artificial
  LNA Oligomer
ttcacctt

SEQ ID NO: 1941 - DNA, 8 bp, artificial
  LNA Oligomer
cgatcccc

SEQ ID NO: 1942 - DNA, 8 bp, artificial
  LNA Oligomer
ccaacctt

SEQ ID NO: 1943 - DNA, 8 bp, artificial
  LNA Oligomer
actatgat

SEQ ID NO: 1944 - DNA, 8 bp, artificial
  LNA Oligomer
aggtccag

SEQ ID NO: 1945 - DNA, 8 bp, artificial
  LNA Oligomer
gaaaccgt

SEQ ID NO: 1946 - DNA, 8 bp, artificial
  LNA Oligomer
gattgtga

SEQ ID NO: 1947 - DNA, 8 bp, artificial
  LNA Oligomer
gaagtgtt

SEQ ID NO: 1948 - DNA, 8 bp, artificial
  LNA Oligomer
ggtccagt

SEQ ID NO: 1949 - DNA, 8 bp, artificial
  LNA Oligomer
atcaggtt

SEQ ID NO: 1950 - DNA, 8 bp, artificial
  LNA Oligomer
caaaagat

SEQ ID NO: 1951 - DNA, 8 bp, artificial
  LNA Oligomer
acagaatt

SEQ ID NO: 1952 - DNA, 8 bp, artificial
  LNA Oligomer
ttcccgtt

SEQ ID NO: 1953 - DNA, 8 bp, artificial
  LNA Oligomer
ccgtcact

SEQ ID NO: 1954 - DNA, 8 bp, artificial
  LNA Oligomer
ggaggacg

SEQ ID NO: 1955 - DNA, 8 bp, artificial
  LNA Oligomer
ggctagtt

SEQ ID NO: 1956 - DNA, 8 bp, artificial
  LNA Oligomer
ttctggtg

SEQ ID NO: 1957 - DNA, 8 bp, artificial
  LNA Oligomer
cttcaacg

SEQ ID NO: 1958 - DNA, 8 bp, artificial
  LNA Oligomer
acctggaa

SEQ ID NO: 1959 - DNA, 8 bp, artificial
  LNA Oligomer
cccatccc

SEQ ID NO: 1960 - DNA, 8 bp, artificial
  LNA Oligomer
cgagacgc

SEQ ID NO: 1961 - DNA, 8 bp, artificial
  LNA Oligomer
tgagcggt

SEQ ID NO: 1962 - DNA, 8 bp, artificial
  LNA Oligomer
gcgttcgg

SEQ ID NO: 1963 - DNA, 8 bp, artificial
  LNA Oligomer
caagtgga

SEQ ID NO: 1964 - DNA, 8 bp, artificial
  LNA Oligomer
cagaccgc

SEQ ID NO: 1965 - DNA, 8 bp, artificial
  LNA Oligomer
ggaccgtg

SEQ ID NO: 1966 - DNA, 8 bp, artificial
  LNA Oligomer
ggcacaat

SEQ ID NO: 1967 - DNA, 8 bp, artificial
  LNA Oligomer
tccatgtc

SEQ ID NO: 1968 - DNA, 8 bp, artificial
  LNA Oligomer
ggcttgtc

SEQ ID NO: 1969 - DNA, 8 bp, artificial
  LNA Oligomer
ctatcata

SEQ ID NO: 1970 - DNA, 8 bp, artificial
  LNA Oligomer
actacctc

SEQ ID NO: 1971 - DNA, 8 bp, artificial
  LNA Oligomer
attgtata

SEQ ID NO: 1972 - DNA, 8 bp, artificial
  LNA Oligomer
actacctc

SEQ ID NO: 1973 - DNA, 8 bp, artificial
  LNA Oligomer
gttgtata

SEQ ID NO: 1974 - DNA, 8 bp, artificial
  LNA Oligomer
actacctc

SEQ ID NO: 1975 - DNA, 8 bp, artificial
  LNA Oligomer
gtaactct

SEQ ID NO: 1976 - DNA, 8 bp, artificial
  LNA Oligomer
actacctc

SEQ ID NO: 1977 - DNA, 8 bp, artificial
  LNA Oligomer
gtcgtata

SEQ ID NO: 1978 - DNA, 8 bp, artificial
  LNA Oligomer
cctacctc

SEQ ID NO: 1979 - DNA, 8 bp, artificial
  LNA Oligomer
gccgtata

SEQ ID NO: 1980 - DNA, 8 bp, artificial
  LNA Oligomer
actacctc

SEQ ID NO: 1981 - DNA, 8 bp, artificial
  LNA Oligomer
attgtata

SEQ ID NO: 1982 - DNA, 8 bp, artificial
  LNA Oligomer
actgtata

SEQ ID NO: 1983 - DNA, 8 bp, artificial
  LNA Oligomer
actacctc

SEQ ID NO: 1984 - DNA, 8 bp, artificial
  LNA Oligomer
cctgtaca

SEQ ID NO: 1985 - DNA, 8 bp, artificial
  LNA Oligomer
actacctc

SEQ ID NO: 1986 - DNA, 8 bp, artificial
  LNA Oligomer
cttgcgca

SEQ ID NO: 1987 - DNA, 8 bp, artificial
  LNA Oligomer
tacattcc

SEQ ID NO: 1988 - DNA, 8 bp, artificial
  LNA Oligomer
ctacgggt

SEQ ID NO: 1989 - DNA, 8 bp, artificial
  LNA Oligomer
acaagctt

SEQ ID NO: 1990 - DNA, 8 bp, artificial
  LNA Oligomer
agtactgt

SEQ ID NO: 1991 - DNA, 8 bp, artificial
  LNA Oligomer
tgataact

SEQ ID NO: 1992 - DNA, 8 bp, artificial
  LNA Oligomer
aatgctgc

SEQ ID NO: 1993 - DNA, 8 bp, artificial
  LNA Oligomer
gggctatg

SEQ ID NO: 1994 - DNA, 8 bp, artificial
  LNA Oligomer
agcatttg

SEQ ID NO: 1995 - DNA, 8 bp, artificial
  LNA Oligomer
aacatccg

SEQ ID NO: 1996 - DNA, 8 bp, artificial
  LNA Oligomer
agcacttt

SEQ ID NO: 1997 - DNA, 8 bp, artificial
  LNA Oligomer
acattgca

SEQ ID NO: 1998 - DNA, 8 bp, artificial
  LNA Oligomer
agcacttt

SEQ ID NO: 1999 - DNA, 8 bp, artificial
  LNA Oligomer
acagtgcg

SEQ ID NO: 2000 - DNA, 8 bp, artificial
  LNA Oligomer
aatgctgc

SEQ ID NO: 2001 - DNA, 8 bp, artificial
  LNA Oligomer
tacagggt

SEQ ID NO: 2002 - DNA, 8 bp, artificial
  LNA Oligomer
acgaattt

SEQ ID NO: 2003 - DNA, 8 bp, artificial
  LNA Oligomer
tacagggt

SEQ ID NO: 2004 - DNA, 8 bp, artificial
  LNA Oligomer
cgaatctg

SEQ ID NO: 2005 - DNA, 8 bp, artificial
  LNA Oligomer
agtgagca

SEQ ID NO: 2006 - DNA, 8 bp, artificial
  LNA Oligomer
agaatgct

SEQ ID NO: 2007 - DNA, 8 bp, artificial
  LNA Oligomer
agccggaa

SEQ ID NO: 2008 - DNA, 8 bp, artificial
  LNA Oligomer
cggcgacg

SEQ ID NO: 2009 - DNA, 8 bp, artificial
  LNA Oligomer
aagaccct

SEQ ID NO: 2010 - DNA, 8 bp, artificial
  LNA Oligomer
cctacagt

SEQ ID NO: 2011 - DNA, 8 bp, artificial
  LNA Oligomer
cgctgcag

SEQ ID NO: 2012 - DNA, 8 bp, artificial
  LNA Oligomer
gtatcctc

SEQ ID NO: 2013 - DNA, 8 bp, artificial
  LNA Oligomer
tgtgtcct

SEQ ID NO: 2014 - DNA, 8 bp, artificial
  LNA Oligomer
gctcagga

SEQ ID NO: 2015 - DNA, 8 bp, artificial
  LNA Oligomer
aatcaggc

SEQ ID NO: 2016 - DNA, 8 bp, artificial
  LNA Oligomer
agctggca

SEQ ID NO: 2017 - DNA, 8 bp, artificial
  LNA Oligomer
ggctccgg

SEQ ID NO: 2018 - DNA, 8 bp, artificial
  LNA Oligomer
aggccacg

SEQ ID NO: 2019 - DNA, 8 bp, artificial
  LNA Oligomer
ccctgcag

SEQ ID NO: 2020 - DNA, 8 bp, artificial
  LNA Oligomer
acatgaac

SEQ ID NO: 2021 - DNA, 8 bp, artificial
  LNA Oligomer
gccagctg

SEQ ID NO: 2022 - DNA, 8 bp, artificial
  LNA Oligomer
tccctgcc

SEQ ID NO: 2023 - DNA, 8 bp, artificial
  LNA Oligomer
gaacagtg

SEQ ID NO: 2024 - DNA, 8 bp, artificial
  LNA Oligomer
cacactcc

SEQ ID NO: 2025 - DNA, 8 bp, artificial
  LNA Oligomer
aatggcgt

SEQ ID NO: 2026 - DNA, 8 bp, artificial
  LNA Oligomer
gaggtggg

SEQ ID NO: 2027 - DNA, 8 bp, artificial
  LNA Oligomer
agtcctca

SEQ ID NO: 2028 - DNA, 8 bp, artificial
  LNA Oligomer
aggggctc

SEQ ID NO: 2029 - DNA, 8 bp, artificial
  LNA Oligomer
cgtaccca

SEQ ID NO: 2030 - DNA, 8 bp, artificial
  LNA Oligomer
ggctggtg

SEQ ID NO: 2031 - DNA, 8 bp, artificial
  LNA Oligomer
tgccctca

SEQ ID NO: 2032 - DNA, 8 bp, artificial
  LNA Oligomer
ggtggcac

SEQ ID NO: 2033 - DNA, 8 bp, artificial
  LNA Oligomer
caggtgtg

SEQ ID NO: 2034 - DNA, 8 bp, artificial
  LNA Oligomer
cccgccca

SEQ ID NO: 2035 - DNA, 8 bp, artificial
  LNA Oligomer
tggtgaga

SEQ ID NO: 2036 - DNA, 8 bp, artificial
  LNA Oligomer
cccagaca

SEQ ID NO: 2037 - DNA, 8 bp, artificial
  LNA Oligomer
cagggctc

SEQ ID NO: 2038 - DNA, 8 bp, artificial
  LNA Oligomer
tcaggccg

SEQ ID NO: 2039 - DNA, 8 bp, artificial
  LNA Oligomer
gggaagag

SEQ ID NO: 2040 - DNA, 8 bp, artificial
  LNA Oligomer
gcagaagg

SEQ ID NO: 2041 - DNA, 8 bp, artificial
  LNA Oligomer
acgaggaa

SEQ ID NO: 2042 - DNA, 8 bp, artificial
  LNA Oligomer
cgtgcctt

SEQ ID NO: 2043 - DNA, 8 bp, artificial
  LNA Oligomer
gtgaacac

SEQ ID NO: 2044 - DNA, 8 bp, artificial
  LNA Oligomer
gatccagt

SEQ ID NO: 2045 - DNA, 8 bp, artificial
  LNA Oligomer
caactact

SEQ ID NO: 2046 - DNA, 8 bp, artificial
  LNA Oligomer
agatcact

SEQ ID NO: 2047 - DNA, 8 bp, artificial
  LNA Oligomer
aaatccat

SEQ ID NO: 2048 - DNA, 8 bp, artificial
  LNA Oligomer
gggacggg

SEQ ID NO: 2049 - DNA, 8 bp, artificial
  LNA Oligomer
caagaagg

SEQ ID NO: 2050 - DNA, 8 bp, artificial
  LNA Oligomer
gaagggcg

SEQ ID NO: 2051 - DNA, 8 bp, artificial
  LNA Oligomer
cagcaccg

SEQ ID NO: 2052 - DNA, 8 bp, artificial
  LNA Oligomer
agctagag

SEQ ID NO: 2053 - DNA, 8 bp, artificial
  LNA Oligomer
tttccttc

SEQ ID NO: 2054 - DNA, 8 bp, artificial
  LNA Oligomer
ttcttctc

SEQ ID NO: 2055 - DNA, 8 bp, artificial
  LNA Oligomer
ttccaggc

SEQ ID NO: 2056 - DNA, 8 bp, artificial
  LNA Oligomer
gctcatcc

SEQ ID NO: 2057 - DNA, 8 bp, artificial
  LNA Oligomer
gctcatcc

SEQ ID NO: 2058 - DNA, 8 bp, artificial
  LNA Oligomer
tcaatgcc

SEQ ID NO: 2059 - DNA, 8 bp, artificial
  LNA Oligomer
tcattcac

SEQ ID NO: 2060 - DNA, 8 bp, artificial
  LNA Oligomer
atcctaac

SEQ ID NO: 2061 - DNA, 8 bp, artificial
  LNA Oligomer
atcatata

SEQ ID NO: 2062 - DNA, 8 bp, artificial
  LNA Oligomer
ctcacctg

SEQ ID NO: 2063 - DNA, 8 bp, artificial
  LNA Oligomer
tctcaggg

SEQ ID NO: 2064 - DNA, 8 bp, artificial
  LNA Oligomer
tctcaggg

SEQ ID NO: 2065 - DNA, 8 bp, artificial
  LNA Oligomer
ctaacccg

SEQ ID NO: 2066 - DNA, 8 bp, artificial
  LNA Oligomer
gacttgtg

SEQ ID NO: 2067 - DNA, 8 bp, artificial
  LNA Oligomer
acggtacg

SEQ ID NO: 2068 - DNA, 8 bp, artificial
  LNA Oligomer
gtaataat

SEQ ID NO: 2069 - DNA, 8 bp, artificial
  LNA Oligomer
aggtggga

SEQ ID NO: 2070 - DNA, 8 bp, artificial
  LNA Oligomer
cttatcca

SEQ ID NO: 2071 - DNA, 8 bp, artificial
  LNA Oligomer
ttcaccca

SEQ ID NO: 2072 - DNA, 8 bp, artificial
  LNA Oligomer
gggtacca

SEQ ID NO: 2073 - DNA, 8 bp, artificial
  LNA Oligomer
taagactt

SEQ ID NO: 2074 - DNA, 8 bp, artificial
  LNA Oligomer
cacatcct

SEQ ID NO: 2075 - DNA, 8 bp, artificial
  LNA Oligomer
gccctgag

SEQ ID NO: 2076 - DNA, 8 bp, artificial
  LNA Oligomer
ttcaacag

SEQ ID NO: 2077 - DNA, 8 bp, artificial
  LNA Oligomer
ccacgccc

SEQ ID NO: 2078 - DNA, 8 bp, artificial
  LNA Oligomer
tcagtcca

SEQ ID NO: 2079 - DNA, 8 bp, artificial
  LNA Oligomer
cggatccg

SEQ ID NO: 2080 - DNA, 8 bp, artificial
  LNA Oligomer
gagcttca

SEQ ID NO: 2081 - DNA, 8 bp, artificial
  LNA Oligomer
tatctcca

SEQ ID NO: 2082 - DNA, 8 bp, artificial
  LNA Oligomer
ggtgccaa

SEQ ID NO: 2083 - DNA, 8 bp, artificial
  LNA Oligomer
atcatcat

SEQ ID NO: 2084 - DNA, 8 bp, artificial
  LNA Oligomer
ttgtcgcc

SEQ ID NO: 2085 - DNA, 8 bp, artificial
  LNA Oligomer
aacaggga

SEQ ID NO: 2086 - DNA, 8 bp, artificial
  LNA Oligomer
gaacaggg

SEQ ID NO: 2087 - DNA, 8 bp, artificial
  LNA Oligomer
ctccccca

SEQ ID NO: 2088 - DNA, 8 bp, artificial
  LNA Oligomer
ggctcttt

SEQ ID NO: 2089 - DNA, 8 bp, artificial
  LNA Oligomer
atctacgt

SEQ ID NO: 2090 - DNA, 8 bp, artificial
  LNA Oligomer
acagtact

SEQ ID NO: 2091 - DNA, 8 bp, artificial
  LNA Oligomer
gcaatatg

SEQ ID NO: 2092 - DNA, 8 bp, artificial
  LNA Oligomer
tcactgtg

SEQ ID NO: 2093 - DNA, 8 bp, artificial
  LNA Oligomer
gcggtggg

SEQ ID NO: 2094 - DNA, 8 bp, artificial
  LNA Oligomer
aggaggcg

SEQ ID NO: 2095 - DNA, 8 bp, artificial
  LNA Oligomer
ggcaaacg

SEQ ID NO: 2096 - DNA, 8 bp, artificial
  LNA Oligomer
ctttgtag

SEQ ID NO: 2097 - DNA, 8 bp, artificial
  LNA Oligomer
ctgtatag

SEQ ID NO: 2098 - DNA, 8 bp, artificial
  LNA Oligomer
ttgcccag

SEQ ID NO: 2099 - DNA, 8 bp, artificial
  LNA Oligomer
ggtcctgc

SEQ ID NO: 2100 - DNA, 8 bp, artificial
  LNA Oligomer
gatccagc

SEQ ID NO: 2101 - DNA, 8 bp, artificial
  LNA Oligomer
ggcagtcc

SEQ ID NO: 2102 - DNA, 8 bp, artificial
  LNA Oligomer
tggactcc

SEQ ID NO: 2103 - DNA, 8 bp, artificial
  LNA Oligomer
taagggct

SEQ ID NO: 2104 - DNA, 8 bp, artificial
  LNA Oligomer
taagggct

SEQ ID NO: 2105 - DNA, 8 bp, artificial
  LNA Oligomer
cgcaaaaa

SEQ ID NO: 2106 - DNA, 8 bp, artificial
  LNA Oligomer
aaaaatcc

SEQ ID NO: 2107 - DNA, 8 bp, artificial
  LNA Oligomer
tcagggcc

SEQ ID NO: 2108 - DNA, 8 bp, artificial
  LNA Oligomer
ccgttccc

SEQ ID NO: 2109 - DNA, 8 bp, artificial
  LNA Oligomer
gaccaccc

SEQ ID NO: 2110 - DNA, 8 bp, artificial
  LNA Oligomer
aacctcac

SEQ ID NO: 2111 - DNA, 8 bp, artificial
  LNA Oligomer
gcggccta

SEQ ID NO: 2112 - DNA, 8 bp, artificial
  LNA Oligomer
gggcccta

SEQ ID NO: 2113 - DNA, 8 bp, artificial
  LNA Oligomer
ttacttga

SEQ ID NO: 2114 - DNA, 8 bp, artificial
  LNA Oligomer
ccgaatga

SEQ ID NO: 2115 - DNA, 8 bp, artificial
  LNA Oligomer
attccaga

SEQ ID NO: 2116 - DNA, 8 bp, artificial
  LNA Oligomer
ccttctca

SEQ ID NO: 2117 - DNA, 8 bp, artificial
  LNA Oligomer
cagctgca

SEQ ID NO: 2118 - DNA, 8 bp, artificial
  LNA Oligomer
atgtccca

SEQ ID NO: 2119 - DNA, 8 bp, artificial
  LNA Oligomer
gtctctaa

SEQ ID NO: 2120 - DNA, 8 bp, artificial
  LNA Oligomer
agcctcaa

SEQ ID NO: 2121 - DNA, 8 bp, artificial
  LNA Oligomer
agttgaaa

SEQ ID NO: 2122 - DNA, 8 bp, artificial
  LNA Oligomer
agccaacg

SEQ ID NO: 2123 - DNA, 8 bp, artificial
  LNA Oligomer
acgccgag

SEQ ID NO: 2124 - DNA, 8 bp, artificial
  LNA Oligomer
cacccatg

SEQ ID NO: 2125 - DNA, 8 bp, artificial
  LNA Oligomer
attgcact

SEQ ID NO: 2126 - DNA, 8 bp, artificial
  LNA Oligomer
caatgtga

SEQ ID NO: 2127 - DNA, 8 bp, artificial
  LNA Oligomer
attgcact

SEQ ID NO: 2128 - DNA, 8 bp, artificial
  LNA Oligomer
ggaaagag

SEQ ID NO: 2129 - DNA, 8 bp, artificial
  LNA Oligomer
agactgtt

SEQ ID NO: 2130 - DNA, 8 bp, artificial
  LNA Oligomer
agccacgg

SEQ ID NO: 2131 - DNA, 8 bp, artificial
  LNA Oligomer
acctccct

SEQ ID NO: 2132 - DNA, 8 bp, artificial
  LNA Oligomer
agcatcat

SEQ ID NO: 2133 - DNA, 8 bp, artificial
  LNA Oligomer
cagttttg

SEQ ID NO: 2134 - DNA, 8 bp, artificial
  LNA Oligomer
tctgtctg

SEQ ID NO: 2135 - DNA, 8 bp, artificial
  LNA Oligomer
gggaccaa

SEQ ID NO: 2136 - DNA, 8 bp, artificial
  LNA Oligomer
gggaccaa

SEQ ID NO: 2137 - DNA, 8 bp, artificial
  LNA Oligomer
ccagtcac

SEQ ID NO: 2138 - DNA, 8 bp, artificial
  LNA Oligomer
aaagccat

SEQ ID NO: 2139 - DNA, 8 bp, artificial
  LNA Oligomer
atccctat

SEQ ID NO: 2140 - DNA, 8 bp, artificial
  LNA Oligomer
aaagccat

SEQ ID NO: 2141 - DNA, 8 bp, artificial
  LNA Oligomer
gccctaca

SEQ ID NO: 2142 - DNA, 8 bp, artificial
  LNA Oligomer
aaatggag

SEQ ID NO: 2143 - DNA, 8 bp, artificial
  LNA Oligomer
acgatgat

SEQ ID NO: 2144 - DNA, 8 bp, artificial
  LNA Oligomer
aagcaata

SEQ ID NO: 2145 - DNA, 8 bp, artificial
  LNA Oligomer
acaccagc

SEQ ID NO: 2146 - DNA, 8 bp, artificial
  LNA Oligomer
tgaagtag

SEQ ID NO: 2147 - DNA, 8 bp, artificial
  LNA Oligomer
tgaaatag

SEQ ID NO: 2148 - DNA, 8 bp, artificial
  LNA Oligomer
cgcgtctc

SEQ ID NO: 2149 - DNA, 8 bp, artificial
  LNA Oligomer
cactgtag

SEQ ID NO: 2150 - DNA, 8 bp, artificial
  LNA Oligomer
cctgtggt

SEQ ID NO: 2151 - DNA, 8 bp, artificial
  LNA Oligomer
aaaccact

SEQ ID NO: 2152 - DNA, 8 bp, artificial
  LNA Oligomer
acagtgtt

SEQ ID NO: 2153 - DNA, 8 bp, artificial
  LNA Oligomer
tggaagat

SEQ ID NO: 2154 - DNA, 8 bp, artificial
  LNA Oligomer
aacactac

SEQ ID NO: 2155 - DNA, 8 bp, artificial
  LNA Oligomer
tactttat

SEQ ID NO: 2156 - DNA, 8 bp, artificial
  LNA Oligomer
ttcatctc

SEQ ID NO: 2157 - DNA, 8 bp, artificial
  LNA Oligomer
cactgcac

SEQ ID NO: 2158 - DNA, 8 bp, artificial
  LNA Oligomer
tatactgt

SEQ ID NO: 2159 - DNA, 8 bp, artificial
  LNA Oligomer
atgatatc

SEQ ID NO: 2160 - DNA, 8 bp, artificial
  LNA Oligomer
aaactgga

SEQ ID NO: 2161 - DNA, 8 bp, artificial
  LNA Oligomer
caggaatc

SEQ ID NO: 2162 - DNA, 8 bp, artificial
  LNA Oligomer
caaacgga

SEQ ID NO: 2163 - DNA, 8 bp, artificial
  LNA Oligomer
cgcgccga

SEQ ID NO: 2164 - DNA, 8 bp, artificial
  LNA Oligomer
cagttctc

SEQ ID NO: 2165 - DNA, 8 bp, artificial
  LNA Oligomer
tttcagag

SEQ ID NO: 2166 - DNA, 8 bp, artificial
  LNA Oligomer
cacagggc

SEQ ID NO: 2167 - DNA, 8 bp, artificial
  LNA Oligomer
cagttctc

SEQ ID NO: 2168 - DNA, 8 bp, artificial
  LNA Oligomer
tccacaca

SEQ ID NO: 2169 - DNA, 8 bp, artificial
  LNA Oligomer
gcggaggg

SEQ ID NO: 2170 - DNA, 8 bp, artificial
  LNA Oligomer
cacgcggg

SEQ ID NO: 2171 - DNA, 8 bp, artificial
  LNA Oligomer
tccgcaca

SEQ ID NO: 2172 - DNA, 8 bp, artificial
  LNA Oligomer
gtgcactg

SEQ ID NO: 2173 - DNA, 8 bp, artificial
  LNA Oligomer
cagaactt

SEQ ID NO: 2174 - DNA, 8 bp, artificial
  LNA Oligomer
atgcactg

SEQ ID NO: 2175 - DNA, 8 bp, artificial
  LNA Oligomer
acagaact

SEQ ID NO: 2176 - DNA, 8 bp, artificial
  LNA Oligomer
ggagccag

SEQ ID NO: 2177 - DNA, 8 bp, artificial
  LNA Oligomer
tccctccc

SEQ ID NO: 2178 - DNA, 8 bp, artificial
  LNA Oligomer
gttgggag

SEQ ID NO: 2179 - DNA, 8 bp, artificial
  LNA Oligomer
ctgtacca

SEQ ID NO: 2180 - DNA, 8 bp, artificial
  LNA Oligomer
tcagtcta

SEQ ID NO: 2181 - DNA, 8 bp, artificial
  LNA Oligomer
gctcctcg

SEQ ID NO: 2182 - DNA, 8 bp, artificial
  LNA Oligomer
atgcactg

SEQ ID NO: 2183 - DNA, 8 bp, artificial
  LNA Oligomer
actatgca

SEQ ID NO: 2184 - DNA, 8 bp, artificial
  LNA Oligomer
gacggttt

SEQ ID NO: 2185 - DNA, 8 bp, artificial
  LNA Oligomer
cccgggcc

SEQ ID NO: 2186 - DNA, 8 bp, artificial
  LNA Oligomer
cgcgcagg

SEQ ID NO: 2187 - DNA, 8 bp, artificial
  LNA Oligomer
gataacct

SEQ ID NO: 2188 - DNA, 8 bp, artificial
  LNA Oligomer
tgtatgat

SEQ ID NO: 2189 - DNA, 8 bp, artificial
  LNA Oligomer
tagcatta

SEQ ID NO: 2190 - DNA, 8 bp, artificial
  LNA Oligomer
atgtagga

SEQ ID NO: 2191 - DNA, 8 bp, artificial
  LNA Oligomer
gtgctgct

SEQ ID NO: 2192 - DNA, 8 bp, artificial
  LNA Oligomer
tatggcct

SEQ ID NO: 2193 - DNA, 8 bp, artificial
  LNA Oligomer
gtgctgct

SEQ ID NO: 2194 - DNA, 8 bp, artificial
  LNA Oligomer
aatgattc

SEQ ID NO: 2195 - DNA, 8 bp, artificial
  LNA Oligomer
gtgctgct

SEQ ID NO: 2196 - DNA, 8 bp, artificial
  LNA Oligomer
taatactg

SEQ ID NO: 2197 - DNA, 8 bp, artificial
  LNA Oligomer
taatattg

SEQ ID NO: 2198 - DNA, 8 bp, artificial
  LNA Oligomer
agcacttt

SEQ ID NO: 2199 - DNA, 8 bp, artificial
  LNA Oligomer
cactgcag

SEQ ID NO: 2200 - DNA, 8 bp, artificial
  LNA Oligomer
ttgaatgt

SEQ ID NO: 2201 - DNA, 8 bp, artificial
  LNA Oligomer
gtcgatgg

SEQ ID NO: 2202 - DNA, 8 bp, artificial
  LNA Oligomer
gtcagtgg

SEQ ID NO: 2203 - DNA, 8 bp, artificial
  LNA Oligomer
atgaatgt

SEQ ID NO: 2204 - DNA, 8 bp, artificial
  LNA Oligomer
ttgaatgt

SEQ ID NO: 2205 - DNA, 8 bp, artificial
  LNA Oligomer
tcgatggt

SEQ ID NO: 2206 - DNA, 8 bp, artificial
  LNA Oligomer
atgaatgt

SEQ ID NO: 2207 - DNA, 8 bp, artificial
  LNA Oligomer
attgccaa

SEQ ID NO: 2208 - DNA, 8 bp, artificial
  LNA Oligomer
ctagaacc

SEQ ID NO: 2209 - DNA, 8 bp, artificial
  LNA Oligomer
ggcactgg

SEQ ID NO: 2210 - DNA, 8 bp, artificial
  LNA Oligomer
atgatcaa

SEQ ID NO: 2211 - DNA, 8 bp, artificial
  LNA Oligomer
actgcctc

SEQ ID NO: 2212 - DNA, 8 bp, artificial
  LNA Oligomer
agtgccat

SEQ ID NO: 2213 - DNA, 8 bp, artificial
  LNA Oligomer
gtaattca

SEQ ID NO: 2214 - DNA, 8 bp, artificial
  LNA Oligomer
ctccgtcc

SEQ ID NO: 2215 - DNA, 8 bp, artificial
  LNA Oligomer
ttctctcc

SEQ ID NO: 2216 - DNA, 8 bp, artificial
  LNA Oligomer
ccagcccc

SEQ ID NO: 2217 - DNA, 8 bp, artificial
  LNA Oligomer
aattcttt

SEQ ID NO: 2218 - DNA, 8 bp, artificial
  LNA Oligomer
cctttggg

SEQ ID NO: 2219 - DNA, 8 bp, artificial
  LNA Oligomer
aagacacg

SEQ ID NO: 2220 - DNA, 8 bp, artificial
  LNA Oligomer
gttgtagc

SEQ ID NO: 2221 - DNA, 8 bp, artificial
  LNA Oligomer
atgtggga

SEQ ID NO: 2222 - DNA, 8 bp, artificial
  LNA Oligomer
caagggat

SEQ ID NO: 2223 - DNA, 8 bp, artificial
  LNA Oligomer
tgcacctt

SEQ ID NO: 2224 - DNA, 8 bp, artificial
  LNA Oligomer
tagggcag

SEQ ID NO: 2225 - DNA, 8 bp, artificial
  LNA Oligomer
tgcacctt

SEQ ID NO: 2226 - DNA, 8 bp, artificial
  LNA Oligomer
tttagggc

SEQ ID NO: 2227 - DNA, 8 bp, artificial
  LNA Oligomer
aacatatc

SEQ ID NO: 2228 - DNA, 8 bp, artificial
  LNA Oligomer
tccccgcc

SEQ ID NO: 2229 - DNA, 8 bp, artificial
  LNA Oligomer
gcccctgc

SEQ ID NO: 2230 - DNA, 8 bp, artificial
  LNA Oligomer
cggcactc

SEQ ID NO: 2231 - DNA, 8 bp, artificial
  LNA Oligomer
aacatatc

SEQ ID NO: 2232 - DNA, 8 bp, artificial
  LNA Oligomer
attccgtt

SEQ ID NO: 2233 - DNA, 8 bp, artificial
  LNA Oligomer
aagcgcag

SEQ ID NO: 2234 - DNA, 8 bp, artificial
  LNA Oligomer
caggactg

SEQ ID NO: 2235 - DNA, 8 bp, artificial
  LNA Oligomer
cggtactc

SEQ ID NO: 2236 - DNA, 8 bp, artificial
  LNA Oligomer
tgcctggt

SEQ ID NO: 2237 - DNA, 8 bp, artificial
  LNA Oligomer
ctctgggt

SEQ ID NO: 2238 - DNA, 8 bp, artificial
  LNA Oligomer
gggggcag

SEQ ID NO: 2239 - DNA, 8 bp, artificial
  LNA Oligomer
ggcacagg

SEQ ID NO: 2240 - DNA, 8 bp, artificial
  LNA Oligomer
gacccctc

SEQ ID NO: 2241 - DNA, 8 bp, artificial
  LNA Oligomer
gccctggg

SEQ ID NO: 2242 - DNA, 8 bp, artificial
  LNA Oligomer
aggcaagg

SEQ ID NO: 2243 - DNA, 8 bp, artificial
  LNA Oligomer
ataggtca

SEQ ID NO: 2244 - DNA, 8 bp, artificial
  LNA Oligomer
aattggca

SEQ ID NO: 2245 - DNA, 8 bp, artificial
  LNA Oligomer
aggccagt

SEQ ID NO: 2246 - DNA, 8 bp, artificial
  LNA Oligomer
aaagaccc

SEQ ID NO: 2247 - DNA, 8 bp, artificial
  LNA Oligomer
gggccagt

SEQ ID NO: 2248 - DNA, 8 bp, artificial
  LNA Oligomer
aaaacccc

SEQ ID NO: 2249 - DNA, 8 bp, artificial
  LNA Oligomer
gctgttac

SEQ ID NO: 2250 - DNA, 8 bp, artificial
  LNA Oligomer
ccccactg

SEQ ID NO: 2251 - DNA, 8 bp, artificial
  LNA Oligomer
gtgctgct

SEQ ID NO: 2252 - DNA, 8 bp, artificial
  LNA Oligomer
caatattg

SEQ ID NO: 2253 - DNA, 8 bp, artificial
  LNA Oligomer
aactacct

SEQ ID NO: 2254 - DNA, 8 bp, artificial
  LNA Oligomer
ttgttgcc

SEQ ID NO: 2255 - DNA, 8 bp, artificial
  LNA Oligomer
aactacct

SEQ ID NO: 2256 - DNA, 8 bp, artificial
  LNA Oligomer
ggtggtga

SEQ ID NO: 2257 - DNA, 8 bp, artificial
  LNA Oligomer
ctctggac

SEQ ID NO: 2258 - DNA, 8 bp, artificial
  LNA Oligomer
aacactgg

SEQ ID NO: 2259 - DNA, 8 bp, artificial
  LNA Oligomer
gactactg

SEQ ID NO: 2260 - DNA, 8 bp, artificial
  LNA Oligomer
aacactgg

SEQ ID NO: 2261 - DNA, 8 bp, artificial
  LNA Oligomer
atttgcac

SEQ ID NO: 2262 - DNA, 8 bp, artificial
  LNA Oligomer
tgcaaaac

SEQ ID NO: 2263 - DNA, 8 bp, artificial
  LNA Oligomer
atttgcac

SEQ ID NO: 2264 - DNA, 8 bp, artificial
  LNA Oligomer
tgcaaaac

SEQ ID NO: 2265 - DNA, 8 bp, artificial
  LNA Oligomer
tgcaaaac

SEQ ID NO: 2266 - DNA, 8 bp, artificial
  LNA Oligomer
acagtgtt

SEQ ID NO: 2267 - DNA, 8 bp, artificial
  LNA Oligomer
ggtaagat

SEQ ID NO: 2268 - DNA, 8 bp, artificial
  LNA Oligomer
gcagtatt

SEQ ID NO: 2269 - DNA, 8 bp, artificial
  LNA Oligomer
agtaagat

SEQ ID NO: 2270 - DNA, 8 bp, artificial
  LNA Oligomer
gcagtatt

SEQ ID NO: 2271 - DNA, 8 bp, artificial
  LNA Oligomer
ggtaagac

SEQ ID NO: 2272 - DNA, 8 bp, artificial
  LNA Oligomer
tatacctc

SEQ ID NO: 2273 - DNA, 8 bp, artificial
  LNA Oligomer
gcatagga

SEQ ID NO: 2274 - DNA, 8 bp, artificial
  LNA Oligomer
acatttca

SEQ ID NO: 2275 - DNA, 8 bp, artificial
  LNA Oligomer
caaaggga

SEQ ID NO: 2276 - DNA, 8 bp, artificial
  LNA Oligomer
aatgaagg

SEQ ID NO: 2277 - DNA, 8 bp, artificial
  LNA Oligomer
tacattcc

SEQ ID NO: 2278 - DNA, 8 bp, artificial
  LNA Oligomer
tcgtctta

SEQ ID NO: 2279 - DNA, 8 bp, artificial
  LNA Oligomer
tcgtctta

SEQ ID NO: 2280 - DNA, 8 bp, artificial
  LNA Oligomer
agcacttt

SEQ ID NO: 2281 - DNA, 8 bp, artificial
  LNA Oligomer
taatgcag

SEQ ID NO: 2282 - DNA, 8 bp, artificial
  LNA Oligomer
agcacttt

SEQ ID NO: 2283 - DNA, 8 bp, artificial
  LNA Oligomer
tactacag

SEQ ID NO: 2284 - DNA, 8 bp, artificial
  LNA Oligomer
gataagct

SEQ ID NO: 2285 - DNA, 8 bp, artificial
  LNA Oligomer
ctggtgtt

SEQ ID NO: 2286 - DNA, 8 bp, artificial
  LNA Oligomer
cacgcaca

SEQ ID NO: 2287 - DNA, 8 bp, artificial
  LNA Oligomer
caaaggga

SEQ ID NO: 2288 - DNA, 8 bp, artificial
  LNA Oligomer
agactgtt

SEQ ID NO: 2289 - DNA, 8 bp, artificial
  LNA Oligomer
gcctgctg

SEQ ID NO: 2290 - DNA, 8 bp, artificial
  LNA Oligomer
agacaggc

SEQ ID NO: 2291 - DNA, 8 bp, artificial
  LNA Oligomer
ataggtca

SEQ ID NO: 2292 - DNA, 8 bp, artificial
  LNA Oligomer
ctgagatt

SEQ ID NO: 2293 - DNA, 8 bp, artificial
  LNA Oligomer
cagagatt

SEQ ID NO: 2294 - DNA, 8 bp, artificial
  LNA Oligomer
gatgcagt

SEQ ID NO: 2295 - DNA, 8 bp, artificial
  LNA Oligomer
caagcaca

SEQ ID NO: 2296 - DNA, 8 bp, artificial
  LNA Oligomer
cggaacca

SEQ ID NO: 2297 - DNA, 8 bp, artificial
  LNA Oligomer
agaaccat

SEQ ID NO: 2298 - DNA, 8 bp, artificial
  LNA Oligomer
ctcaactc

SEQ ID NO: 2299 - DNA, 8 bp, artificial
  LNA Oligomer
cacaattc

SEQ ID NO: 2300 - DNA, 8 bp, artificial
  LNA Oligomer
ggacaatc

SEQ ID NO: 2301 - DNA, 8 bp, artificial
  LNA Oligomer
tggcagct

SEQ ID NO: 2302 - DNA, 8 bp, artificial
  LNA Oligomer
tgaagaac

SEQ ID NO: 2303 - DNA, 8 bp, artificial
  LNA Oligomer
acggtgtg

SEQ ID NO: 2304 - DNA, 8 bp, artificial
  LNA Oligomer
cggtggtg

SEQ ID NO: 2305 - DNA, 8 bp, artificial
  LNA Oligomer
gccctgtg

SEQ ID NO: 2306 - DNA, 8 bp, artificial
  LNA Oligomer
aatgtagc

SEQ ID NO: 2307 - DNA, 8 bp, artificial
  LNA Oligomer
atgccagg

SEQ ID NO: 2308 - DNA, 8 bp, artificial
  LNA Oligomer
gatgtagc

SEQ ID NO: 2309 - DNA, 8 bp, artificial
  LNA Oligomer
gctactga

SEQ ID NO: 2310 - DNA, 8 bp, artificial
  LNA Oligomer
aaactgac

SEQ ID NO: 2311 - DNA, 8 bp, artificial
  LNA Oligomer
aaatacac

SEQ ID NO: 2312 - DNA, 8 bp, artificial
  LNA Oligomer
agtgactt

SEQ ID NO: 2313 - DNA, 8 bp, artificial
  LNA Oligomer
caatgtga

SEQ ID NO: 2314 - DNA, 8 bp, artificial
  LNA Oligomer
aggaaccc

SEQ ID NO: 2315 - DNA, 8 bp, artificial
  LNA Oligomer
caatgtga

SEQ ID NO: 2316 - DNA, 8 bp, artificial
  LNA Oligomer
aggaaccc

SEQ ID NO: 2317 - DNA, 8 bp, artificial
  LNA Oligomer
actgagcc

SEQ ID NO: 2318 - DNA, 8 bp, artificial
  LNA Oligomer
cagtaggc

SEQ ID NO: 2319 - DNA, 8 bp, artificial
  LNA Oligomer
cagtaggc

SEQ ID NO: 2320 - DNA, 8 bp, artificial
  LNA Oligomer
agtgcaat

SEQ ID NO: 2321 - DNA, 8 bp, artificial
  LNA Oligomer
tctccgcc

SEQ ID NO: 2322 - DNA, 8 bp, artificial
  LNA Oligomer
ttacttga

SEQ ID NO: 2323 - DNA, 8 bp, artificial
  LNA Oligomer
aagaatag

SEQ ID NO: 2324 - DNA, 8 bp, artificial
  LNA Oligomer
aagaatag

SEQ ID NO: 2325 - DNA, 8 bp, artificial
  LNA Oligomer
ttacttga

SEQ ID NO: 2326 - DNA, 8 bp, artificial
  LNA Oligomer
gagaacag

SEQ ID NO: 2327 - DNA, 8 bp, artificial
  LNA Oligomer
cactgtga

SEQ ID NO: 2328 - DNA, 8 bp, artificial
  LNA Oligomer
ctaagccc

SEQ ID NO: 2329 - DNA, 8 bp, artificial
  LNA Oligomer
cactgtga

SEQ ID NO: 2330 - DNA, 8 bp, artificial
  LNA Oligomer
ctaagctc

SEQ ID NO: 2331 - DNA, 8 bp, artificial
  LNA Oligomer
aatctagt

SEQ ID NO: 2332 - DNA, 8 bp, artificial
  LNA Oligomer
gagctcct

SEQ ID NO: 2333 - DNA, 8 bp, artificial
  LNA Oligomer
ccaaccct

SEQ ID NO: 2334 - DNA, 8 bp, artificial
  LNA Oligomer
gggggccc

SEQ ID NO: 2335 - DNA, 8 bp, artificial
  LNA Oligomer
cacataca

SEQ ID NO: 2336 - DNA, 8 bp, artificial
  LNA Oligomer
gcttctgc

SEQ ID NO: 2337 - DNA, 8 bp, artificial
  LNA Oligomer
tcccacat

SEQ ID NO: 2338 - DNA, 8 bp, artificial
  LNA Oligomer
ggtaaacc

SEQ ID NO: 2339 - DNA, 8 bp, artificial
  LNA Oligomer
atggtgct

SEQ ID NO: 2340 - DNA, 8 bp, artificial
  LNA Oligomer
gaaatcag

SEQ ID NO: 2341 - DNA, 8 bp, artificial
  LNA Oligomer
atggtgct

SEQ ID NO: 2342 - DNA, 8 bp, artificial
  LNA Oligomer
gaaaccag

SEQ ID NO: 2343 - DNA, 8 bp, artificial
  LNA Oligomer
tgaaacca

SEQ ID NO: 2344 - DNA, 8 bp, artificial
  LNA Oligomer
atggtgct

SEQ ID NO: 2345 - DNA, 8 bp, artificial
  LNA Oligomer
aatcggtc

SEQ ID NO: 2346 - DNA, 8 bp, artificial
  LNA Oligomer
ccttgtat

SEQ ID NO: 2347 - DNA, 8 bp, artificial
  LNA Oligomer
attgcact

SEQ ID NO: 2348 - DNA, 8 bp, artificial
  LNA Oligomer
attgcact

SEQ ID NO: 2349 - DNA, 8 bp, artificial
  LNA Oligomer
aagcactt

SEQ ID NO: 2350 - DNA, 8 bp, artificial
  LNA Oligomer
cgtttaag

SEQ ID NO: 2351 - DNA, 8 bp, artificial
  LNA Oligomer
aagcactt

SEQ ID NO: 2352 - DNA, 8 bp, artificial
  LNA Oligomer
tgttaaag

SEQ ID NO: 2353 - DNA, 8 bp, artificial
  LNA Oligomer
aagcactt

SEQ ID NO: 2354 - DNA, 8 bp, artificial
  LNA Oligomer
catgttaa

SEQ ID NO: 2355 - DNA, 8 bp, artificial
  LNA Oligomer
aagcactt

SEQ ID NO: 2356 - DNA, 8 bp, artificial
  LNA Oligomer
tgttaaag

SEQ ID NO: 2357 - DNA, 8 bp, artificial
  LNA Oligomer
aagcactt

SEQ ID NO: 2358 - DNA, 8 bp, artificial
  LNA Oligomer
aagcaatt

SEQ ID NO: 2359 - DNA, 8 bp, artificial
  LNA Oligomer
atgtttac

SEQ ID NO: 2360 - DNA, 8 bp, artificial
  LNA Oligomer
gactgaaa

SEQ ID NO: 2361 - DNA, 8 bp, artificial
  LNA Oligomer
atgtttac

SEQ ID NO: 2362 - DNA, 8 bp, artificial
  LNA Oligomer
acctccca

SEQ ID NO: 2363 - DNA, 8 bp, artificial
  LNA Oligomer
atgtttac

SEQ ID NO: 2364 - DNA, 8 bp, artificial
  LNA Oligomer
ctctccca

SEQ ID NO: 2365 - DNA, 8 bp, artificial
  LNA Oligomer
ttctccca

SEQ ID NO: 2366 - DNA, 8 bp, artificial
  LNA Oligomer
atgtttac

SEQ ID NO: 2367 - DNA, 8 bp, artificial
  LNA Oligomer
gactgaaa

SEQ ID NO: 2368 - DNA, 8 bp, artificial
  LNA Oligomer
atgtttac

SEQ ID NO: 2369 - DNA, 8 bp, artificial
  LNA Oligomer
gactgaaa

SEQ ID NO: 2370 - DNA, 8 bp, artificial
  LNA Oligomer
atcttgcc

SEQ ID NO: 2371 - DNA, 8 bp, artificial
  LNA Oligomer
ggcatagc

SEQ ID NO: 2372 - DNA, 8 bp, artificial
  LNA Oligomer
tgtgcaat

SEQ ID NO: 2373 - DNA, 8 bp, artificial
  LNA Oligomer
actaaatt

SEQ ID NO: 2374 - DNA, 8 bp, artificial
  LNA Oligomer
ccagcttt

SEQ ID NO: 2375 - DNA, 8 bp, artificial
  LNA Oligomer
ccagcttt

SEQ ID NO: 2376 - DNA, 8 bp, artificial
  LNA Oligomer
ccagcttt

SEQ ID NO: 2377 - DNA, 8 bp, artificial
  LNA Oligomer
ccagcttt

SEQ ID NO: 2378 - DNA, 8 bp, artificial
  LNA Oligomer
tgtaatgt

SEQ ID NO: 2379 - DNA, 8 bp, artificial
  LNA Oligomer
ggaccacc

SEQ ID NO: 2380 - DNA, 8 bp, artificial
  LNA Oligomer
tggggcag

SEQ ID NO: 2381 - DNA, 8 bp, artificial
  LNA Oligomer
ggggatgc

SEQ ID NO: 2382 - DNA, 8 bp, artificial
  LNA Oligomer
cctactag

SEQ ID NO: 2383 - DNA, 8 bp, artificial
  LNA Oligomer
gcccagag

SEQ ID NO: 2384 - DNA, 8 bp, artificial
  LNA Oligomer
gagggcca

SEQ ID NO: 2385 - DNA, 8 bp, artificial
  LNA Oligomer
aggtgtgt

SEQ ID NO: 2386 - DNA, 8 bp, artificial
  LNA Oligomer
gtgctttg

SEQ ID NO: 2387 - DNA, 8 bp, artificial
  LNA Oligomer
gcccagag

SEQ ID NO: 2388 - DNA, 8 bp, artificial
  LNA Oligomer
cccagggg

SEQ ID NO: 2389 - DNA, 8 bp, artificial
  LNA Oligomer
cataccta

SEQ ID NO: 2390 - DNA, 8 bp, artificial
  LNA Oligomer
tgctcttg

SEQ ID NO: 2391 - DNA, 8 bp, artificial
  LNA Oligomer
aatgaaaa

SEQ ID NO: 2392 - DNA, 8 bp, artificial
  LNA Oligomer
atatagga

SEQ ID NO: 2393 - DNA, 8 bp, artificial
  LNA Oligomer
aagccgtt

SEQ ID NO: 2394 - DNA, 8 bp, artificial
  LNA Oligomer
gatgctgg

SEQ ID NO: 2395 - DNA, 8 bp, artificial
  LNA Oligomer
gatattgt

SEQ ID NO: 2396 - DNA, 8 bp, artificial
  LNA Oligomer
aggcgctc

SEQ ID NO: 2397 - DNA, 8 bp, artificial
  LNA Oligomer
ggacaggg

SEQ ID NO: 2398 - DNA, 8 bp, artificial
  LNA Oligomer
acaatgca

SEQ ID NO: 2399 - DNA, 8 bp, artificial
  LNA Oligomer
gaaacatt

SEQ ID NO: 2400 - DNA, 8 bp, artificial
  LNA Oligomer
gcaatgca

SEQ ID NO: 2401 - DNA, 8 bp, artificial
  LNA Oligomer
gaggcact

SEQ ID NO: 2402 - DNA, 8 bp, artificial
  LNA Oligomer
gctttata

SEQ ID NO: 2403 - DNA, 8 bp, artificial
  LNA Oligomer
tgagacgg

SEQ ID NO: 2404 - DNA, 8 bp, artificial
  LNA Oligomer
tgtgtgag

SEQ ID NO: 2405 - DNA, 8 bp, artificial
  LNA Oligomer
agcacccc

SEQ ID NO: 2406 - DNA, 8 bp, artificial
  LNA Oligomer
ggagtcag

SEQ ID NO: 2407 - DNA, 8 bp, artificial
  LNA Oligomer
gggcagac

SEQ ID NO: 2408 - DNA, 8 bp, artificial
  LNA Oligomer
acactgcc

SEQ ID NO: 2409 - DNA, 8 bp, artificial
  LNA Oligomer
tgctgatt

SEQ ID NO: 2410 - DNA, 8 bp, artificial
  LNA Oligomer
tagtgatt

SEQ ID NO: 2411 - DNA, 8 bp, artificial
  LNA Oligomer
cactgcct

SEQ ID NO: 2412 - DNA, 8 bp, artificial
  LNA Oligomer
ttagtgat

SEQ ID NO: 2413 - DNA, 8 bp, artificial
  LNA Oligomer
acactgcc

SEQ ID NO: 2414 - DNA, 8 bp, artificial
  LNA Oligomer
cctggggg

SEQ ID NO: 2415 - DNA, 8 bp, artificial
  LNA Oligomer
ttctgata

SEQ ID NO: 2416 - DNA, 8 bp, artificial
  LNA Oligomer
aggtgtgt

SEQ ID NO: 2417 - DNA, 8 bp, artificial
  LNA Oligomer
ccaaggat

SEQ ID NO: 2418 - DNA, 8 bp, artificial
  LNA Oligomer
cgtgcaat

SEQ ID NO: 2419 - DNA, 8 bp, artificial
  LNA Oligomer
atccaccc

SEQ ID NO: 2420 - DNA, 8 bp, artificial
  LNA Oligomer
ggggcatt

SEQ ID NO: 2421 - DNA, 8 bp, artificial
  LNA Oligomer
agtgcaat

SEQ ID NO: 2422 - DNA, 8 bp, artificial
  LNA Oligomer
agcaacag

SEQ ID NO: 2423 - DNA, 8 bp, artificial
  LNA Oligomer
tgtattat

SEQ ID NO: 2424 - DNA, 8 bp, artificial
  LNA Oligomer
ggtcgatc

SEQ ID NO: 2425 - DNA, 8 bp, artificial
  LNA Oligomer
ccagcagg

SEQ ID NO: 2426 - DNA, 8 bp, artificial
  LNA Oligomer
gcggcact

SEQ ID NO: 2427 - DNA, 8 bp, artificial
  LNA Oligomer
agtttgag

SEQ ID NO: 2428 - DNA, 8 bp, artificial
  LNA Oligomer
cagcactt

SEQ ID NO: 2429 - DNA, 8 bp, artificial
  LNA Oligomer
aagcactt

SEQ ID NO: 2430 - DNA, 8 bp, artificial
  LNA Oligomer
attttgag

SEQ ID NO: 2431 - DNA, 8 bp, artificial
  LNA Oligomer
gtattata

SEQ ID NO: 2432 - DNA, 8 bp, artificial
  LNA Oligomer
tctgataa

SEQ ID NO: 2433 - DNA, 8 bp, artificial
  LNA Oligomer
gtattata

SEQ ID NO: 2434 - DNA, 8 bp, artificial
  LNA Oligomer
cctgctaa

SEQ ID NO: 2435 - DNA, 8 bp, artificial
  LNA Oligomer
acgaacaa

SEQ ID NO: 2436 - DNA, 8 bp, artificial
  LNA Oligomer
ctctatga

SEQ ID NO: 2437 - DNA, 8 bp, artificial
  LNA Oligomer
agaatcta

SEQ ID NO: 2438 - DNA, 8 bp, artificial
  LNA Oligomer
ctctatga

SEQ ID NO: 2439 - DNA, 8 bp, artificial
  LNA Oligomer
ctctatgt

SEQ ID NO: 2440 - DNA, 8 bp, artificial
  LNA Oligomer
ttgtgtga

SEQ ID NO: 2441 - DNA, 8 bp, artificial
  LNA Oligomer
gcaacctc

SEQ ID NO: 2442 - DNA, 8 bp, artificial
  LNA Oligomer
aagtccag

SEQ ID NO: 2443 - DNA, 8 bp, artificial
  LNA Oligomer
agtcagga

SEQ ID NO: 2444 - DNA, 8 bp, artificial
  LNA Oligomer
agtctacc

SEQ ID NO: 2445 - DNA, 8 bp, artificial
  LNA Oligomer
tgttacat

SEQ ID NO: 2446 - DNA, 8 bp, artificial
  LNA Oligomer
tattacat

SEQ ID NO: 2447 - DNA, 8 bp, artificial
  LNA Oligomer
ggtcaacc

SEQ ID NO: 2448 - DNA, 8 bp, artificial
  LNA Oligomer
ccttgtat

SEQ ID NO: 2449 - DNA, 8 bp, artificial
  LNA Oligomer
aacaactt

SEQ ID NO: 2450 - DNA, 8 bp, artificial
  LNA Oligomer
ttctgatc

SEQ ID NO: 2451 - DNA, 8 bp, artificial
  LNA Oligomer
tctaggaa

SEQ ID NO: 2452 - DNA, 8 bp, artificial
  LNA Oligomer
gcaacatt

SEQ ID NO: 2453 - DNA, 8 bp, artificial
  LNA Oligomer
gggtaacc

SEQ ID NO: 2454 - DNA, 8 bp, artificial
  LNA Oligomer
tgttatat

SEQ ID NO: 2455 - DNA, 8 bp, artificial
  LNA Oligomer
ggtctact

SEQ ID NO: 2456 - DNA, 8 bp, artificial
  LNA Oligomer
tgttacat

SEQ ID NO: 2457 - DNA, 8 bp, artificial
  LNA Oligomer
aggtgaag

SEQ ID NO: 2458 - DNA, 8 bp, artificial
  LNA Oligomer
tctgttga

SEQ ID NO: 2459 - DNA, 8 bp, artificial
  LNA Oligomer
aagtccag

SEQ ID NO: 2460 - DNA, 8 bp, artificial
  LNA Oligomer
gaccgagc

SEQ ID NO: 2461 - DNA, 8 bp, artificial
  LNA Oligomer
tgcccctc

SEQ ID NO: 2462 - DNA, 8 bp, artificial
  LNA Oligomer
ttgctgct

SEQ ID NO: 2463 - DNA, 8 bp, artificial
  LNA Oligomer
cacgtttt

SEQ ID NO: 2464 - DNA, 8 bp, artificial
  LNA Oligomer
cgtgtcat

SEQ ID NO: 2465 - DNA, 8 bp, artificial
  LNA Oligomer
attcccga

SEQ ID NO: 2466 - DNA, 8 bp, artificial
  LNA Oligomer
acagtatt

SEQ ID NO: 2467 - DNA, 8 bp, artificial
  LNA Oligomer
tgcaagac

SEQ ID NO: 2468 - DNA, 8 bp, artificial
  LNA Oligomer
gacgacct

SEQ ID NO: 2469 - DNA, 8 bp, artificial
  LNA Oligomer
actccaag

SEQ ID NO: 2470 - DNA, 8 bp, artificial
  LNA Oligomer
gccatcca

SEQ ID NO: 2471 - DNA, 8 bp, artificial
  LNA Oligomer
catcatga

SEQ ID NO: 2472 - DNA, 8 bp, artificial
  LNA Oligomer
catatgca

SEQ ID NO: 2473 - DNA, 8 bp, artificial
  LNA Oligomer
acactgcc

SEQ ID NO: 2474 - DNA, 8 bp, artificial
  LNA Oligomer
acactgcc

SEQ ID NO: 2475 - DNA, 8 bp, artificial
  LNA Oligomer
atcgcaaa

SEQ ID NO: 2476 - DNA, 8 bp, artificial
  LNA Oligomer
tgatccca

SEQ ID NO: 2477 - DNA, 8 bp, artificial
  LNA Oligomer
attgcaaa

SEQ ID NO: 2478 - DNA, 8 bp, artificial
  LNA Oligomer
taacggtt

SEQ ID NO: 2479 - DNA, 8 bp, artificial
  LNA Oligomer
caaacagt

SEQ ID NO: 2480 - DNA, 8 bp, artificial
  LNA Oligomer
gcagatga

SEQ ID NO: 2481 - DNA, 8 bp, artificial
  LNA Oligomer
ggacaacc

SEQ ID NO: 2482 - DNA, 8 bp, artificial
  LNA Oligomer
attgcact

SEQ ID NO: 2483 - DNA, 8 bp, artificial
  LNA Oligomer
tgataggg

SEQ ID NO: 2484 - DNA, 8 bp, artificial
  LNA Oligomer
atggactg

SEQ ID NO: 2485 - DNA, 8 bp, artificial
  LNA Oligomer
aggcacat

SEQ ID NO: 2486 - DNA, 8 bp, artificial
  LNA Oligomer
gaggagtg

SEQ ID NO: 2487 - DNA, 8 bp, artificial
  LNA Oligomer
tcccgtct

SEQ ID NO: 2488 - DNA, 8 bp, artificial
  LNA Oligomer
tgagcctg

SEQ ID NO: 2489 - DNA, 8 bp, artificial
  LNA Oligomer
gtgtatga

SEQ ID NO: 2490 - DNA, 8 bp, artificial
  LNA Oligomer
ccagcctc

SEQ ID NO: 2491 - DNA, 8 bp, artificial
  LNA Oligomer
gctgcccc

SEQ ID NO: 2492 - DNA, 8 bp, artificial
  LNA Oligomer
agtacagg

SEQ ID NO: 2493 - DNA, 8 bp, artificial
  LNA Oligomer
tgtatgat

SEQ ID NO: 2494 - DNA, 8 bp, artificial
  LNA Oligomer
tgtacgat

SEQ ID NO: 2495 - DNA, 8 bp, artificial
  LNA Oligomer
gcctttca

SEQ ID NO: 2496 - DNA, 8 bp, artificial
  LNA Oligomer
ttatctgg

SEQ ID NO: 2497 - DNA, 8 bp, artificial
  LNA Oligomer
tgatgtca

SEQ ID NO: 2498 - DNA, 8 bp, artificial
  LNA Oligomer
tccaggtt

SEQ ID NO: 2499 - DNA, 8 bp, artificial
  LNA Oligomer
gatccatg

SEQ ID NO: 2500 - DNA, 8 bp, artificial
  LNA Oligomer
ttgcataa

SEQ ID NO: 2501 - DNA, 8 bp, artificial
  LNA Oligomer
ttccccac

SEQ ID NO: 2502 - DNA, 8 bp, artificial
  LNA Oligomer
gcaggtcc

SEQ ID NO: 2503 - DNA, 8 bp, artificial
  LNA Oligomer
agaccttc

SEQ ID NO: 2504 - DNA, 8 bp, artificial
  LNA Oligomer
catgtaca

SEQ ID NO: 2505 - DNA, 8 bp, artificial
  LNA Oligomer
tatgtttc

SEQ ID NO: 2506 - DNA, 8 bp, artificial
  LNA Oligomer
tgtttgtt

SEQ ID NO: 2507 - DNA, 8 bp, artificial
  LNA Oligomer
taatactc

SEQ ID NO: 2508 - DNA, 8 bp, artificial
  LNA Oligomer
gtgctgct

SEQ ID NO: 2509 - DNA, 8 bp, artificial
  LNA Oligomer
tgtggttt

SEQ ID NO: 2510 - DNA, 8 bp, artificial
  LNA Oligomer
ggcttgaa

SEQ ID NO: 2511 - DNA, 8 bp, artificial
  LNA Oligomer
tgtgatgt

SEQ ID NO: 2512 - DNA, 8 bp, artificial
  LNA Oligomer
aagtctta

SEQ ID NO: 2513 - DNA, 8 bp, artificial
  LNA Oligomer
caaggatt

SEQ ID NO: 2514 - DNA, 8 bp, artificial
  LNA Oligomer
caggtgca

SEQ ID NO: 2515 - DNA, 8 bp, artificial
  LNA Oligomer
gggtgcat

SEQ ID NO: 2516 - DNA, 8 bp, artificial
  LNA Oligomer
caaaggat

SEQ ID NO: 2517 - DNA, 8 bp, artificial
  LNA Oligomer
aggtgcat

SEQ ID NO: 2518 - DNA, 8 bp, artificial
  LNA Oligomer
agcaagga

SEQ ID NO: 2519 - DNA, 8 bp, artificial
  LNA Oligomer
ccgctgct

SEQ ID NO: 2520 - DNA, 8 bp, artificial
  LNA Oligomer
ccagggtc

SEQ ID NO: 2521 - DNA, 8 bp, artificial
  LNA Oligomer
gtgttgac

SEQ ID NO: 2522 - DNA, 8 bp, artificial
  LNA Oligomer
ctggctcc

SEQ ID NO: 2523 - DNA, 8 bp, artificial
  LNA Oligomer
ggtgcctt

SEQ ID NO: 2524 - DNA, 8 bp, artificial
  LNA Oligomer
ggtgcaaa

SEQ ID NO: 2525 - DNA, 8 bp, artificial
  LNA Oligomer
ctacaatc

SEQ ID NO: 2526 - DNA, 8 bp, artificial
  LNA Oligomer
tctggagt

SEQ ID NO: 2527 - DNA, 8 bp, artificial
  LNA Oligomer
tctgcagt

SEQ ID NO: 2528 - DNA, 8 bp, artificial
  LNA Oligomer
taccaatc

SEQ ID NO: 2529 - DNA, 8 bp, artificial
  LNA Oligomer
tctgcagt

SEQ ID NO: 2530 - DNA, 8 bp, artificial
  LNA Oligomer
tcctgagt

SEQ ID NO: 2531 - DNA, 8 bp, artificial
  LNA Oligomer
aaaagaca

SEQ ID NO: 2532 - DNA, 8 bp, artificial
  LNA Oligomer
acagcact

SEQ ID NO: 2533 - DNA, 8 bp, artificial
  LNA Oligomer
ggctgagt

SEQ ID NO: 2534 - DNA, 8 bp, artificial
  LNA Oligomer
tgaaattt

SEQ ID NO: 2535 - DNA, 8 bp, artificial
  LNA Oligomer
ccctgtga

SEQ ID NO: 2536 - DNA, 8 bp, artificial
  LNA Oligomer
ccttgtga

SEQ ID NO: 2537 - DNA, 8 bp, artificial
  LNA Oligomer
ccttgaga

SEQ ID NO: 2538 - DNA, 8 bp, artificial
  LNA Oligomer
agtgtcaa

SEQ ID NO: 2539 - DNA, 8 bp, artificial
  LNA Oligomer
aaggcact

SEQ ID NO: 2540 - DNA, 8 bp, artificial
  LNA Oligomer
tttggaga

SEQ ID NO: 2541 - DNA, 8 bp, artificial
  LNA Oligomer
aaggaagc

SEQ ID NO: 2542 - DNA, 8 bp, artificial
  LNA Oligomer
cctcgaga

SEQ ID NO: 2543 - DNA, 8 bp, artificial
  LNA Oligomer
cctccaga

SEQ ID NO: 2544 - DNA, 8 bp, artificial
  LNA Oligomer
atctagag

SEQ ID NO: 2545 - DNA, 8 bp, artificial
  LNA Oligomer
atgcacga

SEQ ID NO: 2546 - DNA, 8 bp, artificial
  LNA Oligomer
gatgcacg

SEQ ID NO: 2547 - DNA, 8 bp, artificial
  LNA Oligomer
atgcacga

SEQ ID NO: 2548 - DNA, 8 bp, artificial
  LNA Oligomer
agcgcttt

SEQ ID NO: 2549 - DNA, 8 bp, artificial
  LNA Oligomer
agcgcttt

SEQ ID NO: 2550 - DNA, 8 bp, artificial
  LNA Oligomer
agcgcttt

SEQ ID NO: 2551 - DNA, 8 bp, artificial
  LNA Oligomer
ctccagag

SEQ ID NO: 2552 - DNA, 8 bp, artificial
  LNA Oligomer
agcgcttt

SEQ ID NO: 2553 - DNA, 8 bp, artificial
  LNA Oligomer
cctctaga

SEQ ID NO: 2554 - DNA, 8 bp, artificial
  LNA Oligomer
aagcgctt

SEQ ID NO: 2555 - DNA, 8 bp, artificial
  LNA Oligomer
agcgcttt

SEQ ID NO: 2556 - DNA, 8 bp, artificial
  LNA Oligomer
cctctaga

SEQ ID NO: 2557 - DNA, 8 bp, artificial
  LNA Oligomer
atgcactt

SEQ ID NO: 2558 - DNA, 8 bp, artificial
  LNA Oligomer
cctctaga

SEQ ID NO: 2559 - DNA, 8 bp, artificial
  LNA Oligomer
atgcactt

SEQ ID NO: 2560 - DNA, 8 bp, artificial
  LNA Oligomer
atgcactt

SEQ ID NO: 2561 - DNA, 8 bp, artificial
  LNA Oligomer
ggcacttt

SEQ ID NO: 2562 - DNA, 8 bp, artificial
  LNA Oligomer
gaggcact

SEQ ID NO: 2563 - DNA, 8 bp, artificial
  LNA Oligomer
tttggaga

SEQ ID NO: 2564 - DNA, 8 bp, artificial
  LNA Oligomer
aagcactt

SEQ ID NO: 2565 - DNA, 8 bp, artificial
  LNA Oligomer
cctctgga

SEQ ID NO: 2566 - DNA, 8 bp, artificial
  LNA Oligomer
aagcactt

SEQ ID NO: 2567 - DNA, 8 bp, artificial
  LNA Oligomer
aagcactt

SEQ ID NO: 2568 - DNA, 8 bp, artificial
  LNA Oligomer
aagcactt

SEQ ID NO: 2569 - DNA, 8 bp, artificial
  LNA Oligomer
cctttgta

SEQ ID NO: 2570 - DNA, 8 bp, artificial
  LNA Oligomer
aagcactt

SEQ ID NO: 2571 - DNA, 8 bp, artificial
  LNA Oligomer
gaagcact

SEQ ID NO: 2572 - DNA, 8 bp, artificial
  LNA Oligomer
gcactttg

SEQ ID NO: 2573 - DNA, 8 bp, artificial
  LNA Oligomer
gcactttg

SEQ ID NO: 2574 - DNA, 8 bp, artificial
  LNA Oligomer
aagtgcgt

SEQ ID NO: 2575 - DNA, 8 bp, artificial
  LNA Oligomer
aaccattt

SEQ ID NO: 2576 - DNA, 8 bp, artificial
  LNA Oligomer
agcgcgtt

SEQ ID NO: 2577 - DNA, 8 bp, artificial
  LNA Oligomer
agcgcctt

SEQ ID NO: 2578 - DNA, 8 bp, artificial
  LNA Oligomer
cctttgta

SEQ ID NO: 2579 - DNA, 8 bp, artificial
  LNA Oligomer
agcgcctt

SEQ ID NO: 2580 - DNA, 8 bp, artificial
  LNA Oligomer
cctctgga

SEQ ID NO: 2581 - DNA, 8 bp, artificial
  LNA Oligomer
cctcaaga

SEQ ID NO: 2582 - DNA, 8 bp, artificial
  LNA Oligomer
agcacttt

SEQ ID NO: 2583 - DNA, 8 bp, artificial
  LNA Oligomer
cctttgca

SEQ ID NO: 2584 - DNA, 8 bp, artificial
  LNA Oligomer
tgtgggag

SEQ ID NO: 2585 - DNA, 8 bp, artificial
  LNA Oligomer
caaggcat

SEQ ID NO: 2586 - DNA, 8 bp, artificial
  LNA Oligomer
aatttctc

SEQ ID NO: 2587 - DNA, 8 bp, artificial
  LNA Oligomer
tgcccacc

SEQ ID NO: 2588 - DNA, 8 bp, artificial
  LNA Oligomer
gaatcctt

SEQ ID NO: 2589 - DNA, 8 bp, artificial
  LNA Oligomer
tctgtcac

SEQ ID NO: 2590 - DNA, 8 bp, artificial
  LNA Oligomer
gatccccg

SEQ ID NO: 2591 - DNA, 8 bp, artificial
  LNA Oligomer
cgaatgtt

SEQ ID NO: 2592 - DNA, 8 bp, artificial
  LNA Oligomer
atgcagaa

SEQ ID NO: 2593 - DNA, 8 bp, artificial
  LNA Oligomer
gtttgctg

SEQ ID NO: 2594 - DNA, 8 bp, artificial
  LNA Oligomer
atttactg

SEQ ID NO: 2595 - DNA, 8 bp, artificial
  LNA Oligomer
ccagtttt

SEQ ID NO: 2596 - DNA, 8 bp, artificial
  LNA Oligomer
attacttt

SEQ ID NO: 2597 - DNA, 8 bp, artificial
  LNA Oligomer
aggttctt

SEQ ID NO: 2598 - DNA, 8 bp, artificial
  LNA Oligomer
attacttt

SEQ ID NO: 2599 - DNA, 8 bp, artificial
  LNA Oligomer
agattttt

SEQ ID NO: 2600 - DNA, 8 bp, artificial
  LNA Oligomer
attacttt

SEQ ID NO: 2601 - DNA, 8 bp, artificial
  LNA Oligomer
tggttttt

SEQ ID NO: 2602 - DNA, 8 bp, artificial
  LNA Oligomer
attacttt

SEQ ID NO: 2603 - DNA, 8 bp, artificial
  LNA Oligomer
tcagtttt

SEQ ID NO: 2604 - DNA, 8 bp, artificial
  LNA Oligomer
acagtttt

SEQ ID NO: 2605 - DNA, 8 bp, artificial
  LNA Oligomer
tacagttt

SEQ ID NO: 2606 - DNA, 8 bp, artificial
  LNA Oligomer
attacttt

SEQ ID NO: 2607 - DNA, 8 bp, artificial
  LNA Oligomer
attacttt

SEQ ID NO: 2608 - DNA, 8 bp, artificial
  LNA Oligomer
attacttt

SEQ ID NO: 2609 - DNA, 8 bp, artificial
  LNA Oligomer
agtacttt

SEQ ID NO: 2610 - DNA, 8 bp, artificial
  LNA Oligomer
aatacttt

SEQ ID NO: 2611 - DNA, 8 bp, artificial
  LNA Oligomer
ataccttt

SEQ ID NO: 2612 - DNA, 8 bp, artificial
  LNA Oligomer
ttactttt

SEQ ID NO: 2613 - DNA, 8 bp, artificial
  LNA Oligomer
cagttttg

SEQ ID NO: 2614 - DNA, 8 bp, artificial
  LNA Oligomer
tttttgct

SEQ ID NO: 2615 - DNA, 8 bp, artificial
  LNA Oligomer
tagttgtc

SEQ ID NO: 2616 - DNA, 8 bp, artificial
  LNA Oligomer
tcaggcac

SEQ ID NO: 2617 - DNA, 8 bp, artificial
  LNA Oligomer
agtaagac

SEQ ID NO: 2618 - DNA, 8 bp, artificial
  LNA Oligomer
gtgggtcg

SEQ ID NO: 2619 - DNA, 8 bp, artificial
  LNA Oligomer
atgggtcg

SEQ ID NO: 2620 - DNA, 8 bp, artificial
  LNA Oligomer
cttgattt

SEQ ID NO: 2621 - DNA, 8 bp, artificial
  LNA Oligomer
tcacctgt

SEQ ID NO: 2622 - DNA, 8 bp, artificial
  LNA Oligomer
caccgttt

SEQ ID NO: 2623 - DNA, 8 bp, artificial
  LNA Oligomer
aggactag

SEQ ID NO: 2624 - DNA, 8 bp, artificial
  LNA Oligomer
gcttaccc

SEQ ID NO: 2625 - DNA, 8 bp, artificial
  LNA Oligomer
tggtaata

SEQ ID NO: 2626 - DNA, 8 bp, artificial
  LNA Oligomer
gagctcat

SEQ ID NO: 2627 - DNA, 8 bp, artificial
  LNA Oligomer
cgtgcaaa

SEQ ID NO: 2628 - DNA, 8 bp, artificial
  LNA Oligomer
agcagctc

SEQ ID NO: 2629 - DNA, 8 bp, artificial
  LNA Oligomer
tttacttt

SEQ ID NO: 2630 - DNA, 8 bp, artificial
  LNA Oligomer
taaacttt

SEQ ID NO: 2631 - DNA, 8 bp, artificial
  LNA Oligomer
agctactt

SEQ ID NO: 2632 - DNA, 8 bp, artificial
  LNA Oligomer
tgtcaacc

SEQ ID NO: 2633 - DNA, 8 bp, artificial
  LNA Oligomer
accgtgcc

SEQ ID NO: 2634 - DNA, 8 bp, artificial
  LNA Oligomer
caggcgcc

SEQ ID NO: 2635 - DNA, 8 bp, artificial
  LNA Oligomer
gaacatac

SEQ ID NO: 2636 - DNA, 8 bp, artificial
  LNA Oligomer
tttataca

SEQ ID NO: 2637 - DNA, 8 bp, artificial
  LNA Oligomer
tcattaac

SEQ ID NO: 2638 - DNA, 8 bp, artificial
  LNA Oligomer
ctgttttc

SEQ ID NO: 2639 - DNA, 8 bp, artificial
  LNA Oligomer
gccaactc

SEQ ID NO: 2640 - DNA, 8 bp, artificial
  LNA Oligomer
cgagcgga

SEQ ID NO: 2641 - DNA, 8 bp, artificial
  LNA Oligomer
tcacttca

SEQ ID NO: 2642 - DNA, 8 bp, artificial
  LNA Oligomer
atgagcgt

SEQ ID NO: 2643 - DNA, 8 bp, artificial
  LNA Oligomer
acacactc

SEQ ID NO: 2644 - DNA, 8 bp, artificial
  LNA Oligomer
aactggct

SEQ ID NO: 2645 - DNA, 8 bp, artificial
  LNA Oligomer
ccacatct

SEQ ID NO: 2646 - DNA, 8 bp, artificial
  LNA Oligomer
aattagaa

SEQ ID NO: 2647 - DNA, 8 bp, artificial
  LNA Oligomer
ttttatct

SEQ ID NO: 2648 - DNA, 8 bp, artificial
  LNA Oligomer
cacaagaa

SEQ ID NO: 2649 - DNA, 8 bp, artificial
  LNA Oligomer
ccaaatga

SEQ ID NO: 2650 - DNA, 8 bp, artificial
  LNA Oligomer
cattctca

SEQ ID NO: 2651 - DNA, 8 bp, artificial
  LNA Oligomer
aacacaag

SEQ ID NO: 2652 - DNA, 8 bp, artificial
  LNA Oligomer
aaccagtt

SEQ ID NO: 2653 - DNA, 8 bp, artificial
  LNA Oligomer
caactgta

SEQ ID NO: 2654 - DNA, 8 bp, artificial
  LNA Oligomer
tcctcttt

SEQ ID NO: 2655 - DNA, 8 bp, artificial
  LNA Oligomer
aaaccata

SEQ ID NO: 2656 - DNA, 8 bp, artificial
  LNA Oligomer
atacgccc

SEQ ID NO: 2657 - DNA, 8 bp, artificial
  LNA Oligomer
caatgcat

SEQ ID NO: 2658 - DNA, 8 bp, artificial
  LNA Oligomer
ctatggaa

SEQ ID NO: 2659 - DNA, 8 bp, artificial
  LNA Oligomer
tgtggcca

SEQ ID NO: 2660 - DNA, 8 bp, artificial
  LNA Oligomer
tggttctc

SEQ ID NO: 2661 - DNA, 8 bp, artificial
  LNA Oligomer
ttgttctg

SEQ ID NO: 2662 - DNA, 8 bp, artificial
  LNA Oligomer
ataaaatt

SEQ ID NO: 2663 - DNA, 8 bp, artificial
  LNA Oligomer
aataagct

SEQ ID NO: 2664 - DNA, 8 bp, artificial
  LNA Oligomer
ccatggtc

SEQ ID NO: 2665 - DNA, 8 bp, artificial
  LNA Oligomer
ttgacaca

SEQ ID NO: 2666 - DNA, 8 bp, artificial
  LNA Oligomer
gcagagac

SEQ ID NO: 2667 - DNA, 8 bp, artificial
  LNA Oligomer
ctggtgcc

SEQ ID NO: 2668 - DNA, 8 bp, artificial
  LNA Oligomer
gcacactt

SEQ ID NO: 2669 - DNA, 8 bp, artificial
  LNA Oligomer
ggcaggct

SEQ ID NO: 2670 - DNA, 8 bp, artificial
  LNA Oligomer
agtgacac

SEQ ID NO: 2671 - DNA, 8 bp, artificial
  LNA Oligomer
gatgacgt

SEQ ID NO: 2672 - DNA, 8 bp, artificial
  LNA Oligomer
tgacacaa

SEQ ID NO: 2673 - DNA, 8 bp, artificial
  LNA Oligomer
tctgtaag

SEQ ID NO: 2674 - DNA, 8 bp, artificial
  LNA Oligomer
cctagacc

SEQ ID NO: 2675 - DNA, 8 bp, artificial
  LNA Oligomer
gcccgtgt

SEQ ID NO: 2676 - DNA, 8 bp, artificial
  LNA Oligomer
cagtgtgt

SEQ ID NO: 2677 - DNA, 8 bp, artificial
  LNA Oligomer
ccgcagcc

SEQ ID NO: 2678 - DNA, 8 bp, artificial
  LNA Oligomer
tgggattt

SEQ ID NO: 2679 - DNA, 8 bp, artificial
  LNA Oligomer
cagtagtt

SEQ ID NO: 2680 - DNA, 8 bp, artificial
  LNA Oligomer
gatttgaa

SEQ ID NO: 2681 - DNA, 8 bp, artificial
  LNA Oligomer
accacccc

SEQ ID NO: 2682 - DNA, 8 bp, artificial
  LNA Oligomer
aaacaccc

SEQ ID NO: 2683 - DNA, 8 bp, artificial
  LNA Oligomer
tttagctc

SEQ ID NO: 2684 - DNA, 8 bp, artificial
  LNA Oligomer
ggtcctcg

SEQ ID NO: 2685 - DNA, 8 bp, artificial
  LNA Oligomer
ctgcccag

SEQ ID NO: 2686 - DNA, 8 bp, artificial
  LNA Oligomer
aacattcc

SEQ ID NO: 2687 - DNA, 8 bp, artificial
  LNA Oligomer
caggcgtt

SEQ ID NO: 2688 - DNA, 8 bp, artificial
  LNA Oligomer
aggctcgg

SEQ ID NO: 2689 - DNA, 8 bp, artificial
  LNA Oligomer
gggacccc

SEQ ID NO: 2690 - DNA, 8 bp, artificial
  LNA Oligomer
ccaatgac

SEQ ID NO: 2691 - DNA, 8 bp, artificial
  LNA Oligomer
gttttgag

SEQ ID NO: 2692 - DNA, 8 bp, artificial
  LNA Oligomer
gggaagtc

SEQ ID NO: 2693 - DNA, 8 bp, artificial
  LNA Oligomer
gtagagtt

SEQ ID NO: 2694 - DNA, 8 bp, artificial
  LNA Oligomer
gtccaggt

SEQ ID NO: 2695 - DNA, 8 bp, artificial
  LNA Oligomer
tatctcca

SEQ ID NO: 2696 - DNA, 8 bp, artificial
  LNA Oligomer
ttgctagc

SEQ ID NO: 2697 - DNA, 8 bp, artificial
  LNA Oligomer
gcagactg

SEQ ID NO: 2698 - DNA, 8 bp, artificial
  LNA Oligomer
gcaaggga

SEQ ID NO: 2699 - DNA, 8 bp, artificial
  LNA Oligomer
taccttgt

SEQ ID NO: 2700 - DNA, 8 bp, artificial
  LNA Oligomer
ctggtact

SEQ ID NO: 2701 - DNA, 8 bp, artificial
  LNA Oligomer
tttccccc

SEQ ID NO: 2702 - DNA, 8 bp, artificial
  LNA Oligomer
tctatagt

SEQ ID NO: 2703 - DNA, 8 bp, artificial
  LNA Oligomer
cagacagc

SEQ ID NO: 2704 - DNA, 8 bp, artificial
  LNA Oligomer
gagactca

SEQ ID NO: 2705 - DNA, 8 bp, artificial
  LNA Oligomer
cttactag

SEQ ID NO: 2706 - DNA, 8 bp, artificial
  LNA Oligomer
tgtcagca

SEQ ID NO: 2707 - DNA, 8 bp, artificial
  LNA Oligomer
gtaaaccc

SEQ ID NO: 2708 - DNA, 8 bp, artificial
  LNA Oligomer
tgggagaa

SEQ ID NO: 2709 - DNA, 8 bp, artificial
  LNA Oligomer
cagaatac

SEQ ID NO: 2710 - DNA, 8 bp, artificial
  LNA Oligomer
gccaggtc

SEQ ID NO: 2711 - DNA, 8 bp, artificial
  LNA Oligomer
agcagaca

SEQ ID NO: 2712 - DNA, 8 bp, artificial
  LNA Oligomer
tactatta

SEQ ID NO: 2713 - DNA, 8 bp, artificial
  LNA Oligomer
gtgctggt

SEQ ID NO: 2714 - DNA, 8 bp, artificial
  LNA Oligomer
tgcccaag

SEQ ID NO: 2715 - DNA, 8 bp, artificial
  LNA Oligomer
gcaagcac

SEQ ID NO: 2716 - DNA, 8 bp, artificial
  LNA Oligomer
gcccccag

SEQ ID NO: 2717 - DNA, 8 bp, artificial
  LNA Oligomer
gcgatccc

SEQ ID NO: 2718 - DNA, 8 bp, artificial
  LNA Oligomer
cgcagcga

SEQ ID NO: 2719 - DNA, 8 bp, artificial
  LNA Oligomer
ctggatca

SEQ ID NO: 2720 - DNA, 8 bp, artificial
  LNA Oligomer
tatgtctt

SEQ ID NO: 2721 - DNA, 8 bp, artificial
  LNA Oligomer
gagaggga

SEQ ID NO: 2722 - DNA, 8 bp, artificial
  LNA Oligomer
catacaag

SEQ ID NO: 2723 - DNA, 8 bp, artificial
  LNA Oligomer
agccacac

SEQ ID NO: 2724 - DNA, 8 bp, artificial
  LNA Oligomer
cagcctag

SEQ ID NO: 2725 - DNA, 8 bp, artificial
  LNA Oligomer
cagctgct

SEQ ID NO: 2726 - DNA, 8 bp, artificial
  LNA Oligomer
tgcagcca

SEQ ID NO: 2727 - DNA, 8 bp, artificial
  LNA Oligomer
tgcacact

SEQ ID NO: 2728 - DNA, 8 bp, artificial
  LNA Oligomer
cacaggtt

SEQ ID NO: 2729 - DNA, 8 bp, artificial
  LNA Oligomer
ctgcctcc

SEQ ID NO: 2730 - DNA, 8 bp, artificial
  LNA Oligomer
tatcctaa

SEQ ID NO: 2731 - DNA, 8 bp, artificial
  LNA Oligomer
ggcgccat

SEQ ID NO: 2732 - DNA, 8 bp, artificial
  LNA Oligomer
tttcaaca

SEQ ID NO: 2733 - DNA, 8 bp, artificial
  LNA Oligomer
gcagacat

SEQ ID NO: 2734 - DNA, 8 bp, artificial
  LNA Oligomer
ggcccacc

SEQ ID NO: 2735 - DNA, 8 bp, artificial
  LNA Oligomer
atgtatta

SEQ ID NO: 2736 - DNA, 8 bp, artificial
  LNA Oligomer
tataatat

SEQ ID NO: 2737 - DNA, 8 bp, artificial
  LNA Oligomer
gaacctgc

SEQ ID NO: 2738 - DNA, 8 bp, artificial
  LNA Oligomer
ccctccgc

SEQ ID NO: 2739 - DNA, 8 bp, artificial
  LNA Oligomer
tgaaccaa

SEQ ID NO: 2740 - DNA, 8 bp, artificial
  LNA Oligomer
caatgggt

SEQ ID NO: 2741 - DNA, 8 bp, artificial
  LNA Oligomer
acccaggc

SEQ ID NO: 2742 - DNA, 8 bp, artificial
  LNA Oligomer
aacgtggg

SEQ ID NO: 2743 - DNA, 8 bp, artificial
  LNA Oligomer
gccccgcc

SEQ ID NO: 2744 - DNA, 8 bp, artificial
  LNA Oligomer
cgggccac

SEQ ID NO: 2745 - DNA, 8 bp, artificial
  LNA Oligomer
aaatgaat

SEQ ID NO: 2746 - DNA, 8 bp, artificial
  LNA Oligomer
ctagccag

SEQ ID NO: 2747 - DNA, 8 bp, artificial
  LNA Oligomer
cctcctgg

SEQ ID NO: 2748 - DNA, 8 bp, artificial
  LNA Oligomer
cgagtgac

SEQ ID NO: 2749 - DNA, 8 bp, artificial
  LNA Oligomer
agaaccgg

SEQ ID NO: 2750 - DNA, 8 bp, artificial
  LNA Oligomer
gggcttcc

SEQ ID NO: 2751 - DNA, 8 bp, artificial
  LNA Oligomer
tccgcacc

SEQ ID NO: 2752 - DNA, 8 bp, artificial
  LNA Oligomer
ggcataca

SEQ ID NO: 2753 - DNA, 8 bp, artificial
  LNA Oligomer
agtcttcc

SEQ ID NO: 2754 - DNA, 8 bp, artificial
  LNA Oligomer
gatttgtt

SEQ ID NO: 2755 - DNA, 8 bp, artificial
  LNA Oligomer
gatttgtt

SEQ ID NO: 2756 - DNA, 8 bp, artificial
  LNA Oligomer
aagctcct

SEQ ID NO: 2757 - DNA, 8 bp, artificial
  LNA Oligomer
gtctagtt

SEQ ID NO: 2758 - DNA, 8 bp, artificial
  LNA Oligomer
ccagcgag

SEQ ID NO: 2759 - DNA, 8 bp, artificial
  LNA Oligomer
agccccgc

SEQ ID NO: 2760 - DNA, 8 bp, artificial
  LNA Oligomer
tggcaaca

SEQ ID NO: 2761 - DNA, 8 bp, artificial
  LNA Oligomer
ggtcacaa

SEQ ID NO: 2762 - DNA, 8 bp, artificial
  LNA Oligomer
ccagagcc

SEQ ID NO: 2763 - DNA, 8 bp, artificial
  LNA Oligomer
tctcctcc

SEQ ID NO: 2764 - DNA, 8 bp, artificial
  LNA Oligomer
ggctggag

SEQ ID NO: 2765 - DNA, 8 bp, artificial
  LNA Oligomer
atgagcag

SEQ ID NO: 2766 - DNA, 8 bp, artificial
  LNA Oligomer
catggtgc

SEQ ID NO: 2767 - DNA, 8 bp, artificial
  LNA Oligomer
agatccca

SEQ ID NO: 2768 - DNA, 8 bp, artificial
  LNA Oligomer
gaggtctc

SEQ ID NO: 2769 - DNA, 8 bp, artificial
  LNA Oligomer
ggtactgg

SEQ ID NO: 2770 - DNA, 8 bp, artificial
  LNA Oligomer
ttgttact

SEQ ID NO: 2771 - DNA, 8 bp, artificial
  LNA Oligomer
agttcctg

SEQ ID NO: 2772 - DNA, 8 bp, artificial
  LNA Oligomer
ccagggca

SEQ ID NO: 2773 - DNA, 8 bp, artificial
  LNA Oligomer
gtttccag

SEQ ID NO: 2774 - DNA, 8 bp, artificial
  LNA Oligomer
tgaggtat

SEQ ID NO: 2775 - DNA, 8 bp, artificial
  LNA Oligomer
aaaccacc

SEQ ID NO: 2776 - DNA, 8 bp, artificial
  LNA Oligomer
agaaatcc

SEQ ID NO: 2777 - DNA, 8 bp, artificial
  LNA Oligomer
ctcctcta

SEQ ID NO: 2778 - DNA, 8 bp, artificial
  LNA Oligomer
agaagagg

SEQ ID NO: 2779 - DNA, 8 bp, artificial
  LNA Oligomer
ccgctgcc

SEQ ID NO: 2780 - DNA, 8 bp, artificial
  LNA Oligomer
tgtaatgg

SEQ ID NO: 2781 - DNA, 8 bp, artificial
  LNA Oligomer
gcacccgc

SEQ ID NO: 2782 - DNA, 8 bp, artificial
  LNA Oligomer
tccgaccc

SEQ ID NO: 2783 - DNA, 8 bp, artificial
  LNA Oligomer
cccgttca

SEQ ID NO: 2784 - DNA, 8 bp, artificial
  LNA Oligomer
ttttgagt

SEQ ID NO: 2785 - DNA, 8 bp, artificial
  LNA Oligomer
gtgtcagt

SEQ ID NO: 2786 - DNA, 8 bp, artificial
  LNA Oligomer
cgatatta

SEQ ID NO: 2787 - DNA, 8 bp, artificial
  LNA Oligomer
ttccaagt

SEQ ID NO: 2788 - DNA, 8 bp, artificial
  LNA Oligomer
ttcgttgc

SEQ ID NO: 2789 - DNA, 8 bp, artificial
  LNA Oligomer
taagttgc

SEQ ID NO: 2790 - DNA, 8 bp, artificial
  LNA Oligomer
gacacagt

SEQ ID NO: 2791 - DNA, 8 bp, artificial
  LNA Oligomer
gagccagt

SEQ ID NO: 2792 - DNA, 8 bp, artificial
  LNA Oligomer
aaccaaag

SEQ ID NO: 2793 - DNA, 8 bp, artificial
  LNA Oligomer
tagcttta

SEQ ID NO: 2794 - DNA, 8 bp, artificial
  LNA Oligomer
cagctccc

SEQ ID NO: 2795 - DNA, 8 bp, artificial
  LNA Oligomer
cctcacta

SEQ ID NO: 2796 - DNA, 8 bp, artificial
  LNA Oligomer
ctctgctg

SEQ ID NO: 2797 - DNA, 8 bp, artificial
  LNA Oligomer
tccgctga

SEQ ID NO: 2798 - DNA, 8 bp, artificial
  LNA Oligomer
caagactc

SEQ ID NO: 2799 - DNA, 8 bp, artificial
  LNA Oligomer
agtgcaat

SEQ ID NO: 2800 - DNA, 8 bp, artificial
  LNA Oligomer
tcccaacc

SEQ ID NO: 2801 - DNA, 8 bp, artificial
  LNA Oligomer
tccccacc

SEQ ID NO: 2802 - DNA, 8 bp, artificial
  LNA Oligomer
agtgcaat

SEQ ID NO: 2803 - DNA, 8 bp, artificial
  LNA Oligomer
cccgtccc

SEQ ID NO: 2804 - DNA, 8 bp, artificial
  LNA Oligomer
agcacttt

SEQ ID NO: 2805 - DNA, 8 bp, artificial
  LNA Oligomer
ctcagcag

SEQ ID NO: 2806 - DNA, 8 bp, artificial
  LNA Oligomer
ctgcgcac

SEQ ID NO: 2807 - DNA, 8 bp, artificial
  LNA Oligomer
tagtagac

SEQ ID NO: 2808 - DNA, 8 bp, artificial
  LNA Oligomer
ggtaactg

SEQ ID NO: 2809 - DNA, 8 bp, artificial
  LNA Oligomer
ctctactg

SEQ ID NO: 2810 - DNA, 8 bp, artificial
  LNA Oligomer
agcgcgga

SEQ ID NO: 2811 - DNA, 8 bp, artificial
  LNA Oligomer
ttaagggc

SEQ ID NO: 2812 - DNA, 8 bp, artificial
  LNA Oligomer
agctcccc

SEQ ID NO: 2813 - DNA, 8 bp, artificial
  LNA Oligomer
ccctgcct

SEQ ID NO: 2814 - DNA, 8 bp, artificial
  LNA Oligomer
agccgggt

SEQ ID NO: 2815 - DNA, 8 bp, artificial
  LNA Oligomer
cagagaag

SEQ ID NO: 2816 - DNA, 8 bp, artificial
  LNA Oligomer
aacagtca

SEQ ID NO: 2817 - DNA, 8 bp, artificial
  LNA Oligomer
caataatt

SEQ ID NO: 2818 - DNA, 8 bp, artificial
  LNA Oligomer
cccgttga

SEQ ID NO: 2819 - DNA, 8 bp, artificial
  LNA Oligomer
agtgccaa

SEQ ID NO: 2820 - DNA, 8 bp, artificial
  LNA Oligomer
cacatgat

SEQ ID NO: 2821 - DNA, 8 bp, artificial
  LNA Oligomer
actacctc

SEQ ID NO: 2822 - DNA, 8 bp, artificial
  LNA Oligomer
ctacgggt

SEQ ID NO: 2823 - DNA, 8 bp, artificial
  LNA Oligomer
gcgagctt

SEQ ID NO: 2824 - DNA, 8 bp, artificial
  LNA Oligomer
ctacgggt

SEQ ID NO: 2825 - DNA, 8 bp, artificial
  LNA Oligomer
acgagctt

SEQ ID NO: 2826 - DNA, 8 bp, artificial
  LNA Oligomer
gtccttcc

SEQ ID NO: 2827 - DNA, 8 bp, artificial
  LNA Oligomer
tggctcag

SEQ ID NO: 2828 - DNA, 8 bp, artificial
  LNA Oligomer
cgcgtgcg

SEQ ID NO: 2829 - DNA, 8 bp, artificial
  LNA Oligomer
cagtccca

SEQ ID NO: 2830 - DNA, 8 bp, artificial
  LNA Oligomer
acaggcaa

SEQ ID NO: 2831 - DNA, 8 bp, artificial
  LNA Oligomer
aactctac

SEQ ID NO: 2832 - DNA, 8 bp, artificial
  LNA Oligomer
atctctga

SEQ ID NO: 2833 - DNA, 8 bp, artificial
  LNA Oligomer
cgggaagt

SEQ ID NO: 2834 - DNA, 8 bp, artificial
  LNA Oligomer
tcctgtaa

SEQ ID NO: 2835 - DNA, 8 bp, artificial
  LNA Oligomer
acaacact

SEQ ID NO: 2836 - DNA, 8 bp, artificial
  LNA Oligomer
acaacacc

SEQ ID NO: 2837 - DNA, 8 bp, artificial
  LNA Oligomer
aagcatta

SEQ ID NO: 2838 - DNA, 8 bp, artificial
  LNA Oligomer
tggcctgg

SEQ ID NO: 2839 - DNA, 8 bp, artificial
  LNA Oligomer
actacagt

SEQ ID NO: 2840 - DNA, 8 bp, artificial
  LNA Oligomer
agaatgtg

SEQ ID NO: 2841 - DNA, 8 bp, artificial
  LNA Oligomer
tgaccgcg

SEQ ID NO: 2842 - DNA, 8 bp, artificial
  LNA Oligomer
agtattct

SEQ ID NO: 2843 - DNA, 8 bp, artificial
  LNA Oligomer
ggtttagc

SEQ ID NO: 2844 - DNA, 8 bp, artificial
  LNA Oligomer
ggcatcct

SEQ ID NO: 2845 - DNA, 8 bp, artificial
  LNA Oligomer
aaaccatc

SEQ ID NO: 2846 - DNA, 8 bp, artificial
  LNA Oligomer
tgctgctg

SEQ ID NO: 2847 - DNA, 8 bp, artificial
  LNA Oligomer
atgggatc

SEQ ID NO: 2848 - DNA, 8 bp, artificial
  LNA Oligomer
tcgcgcct

SEQ ID NO: 2849 - DNA, 8 bp, artificial
  LNA Oligomer
tataccca

SEQ ID NO: 2850 - DNA, 8 bp, artificial
  LNA Oligomer
cagctggg

SEQ ID NO: 2851 - DNA, 7 bp, artificial
  LNA Oligomer
cggtgct

SEQ ID NO: 2852 - DNA, 7 bp, artificial
  LNA Oligomer
cactaag

SEQ ID NO: 2853 - DNA, 7 bp, artificial
  LNA Oligomer
gttatgt

SEQ ID NO: 2854 - DNA, 7 bp, artificial
  LNA Oligomer
gaggtgg

SEQ ID NO: 2855 - DNA, 7 bp, artificial
  LNA Oligomer
gtgtgcg

SEQ ID NO: 2856 - DNA, 7 bp, artificial
  LNA Oligomer
ctgtctg

SEQ ID NO: 2857 - DNA, 7 bp, artificial
  LNA Oligomer
ccacagg

SEQ ID NO: 2858 - DNA, 7 bp, artificial
  LNA Oligomer
aagttac

SEQ ID NO: 2859 - DNA, 7 bp, artificial
  LNA Oligomer
agccggt

SEQ ID NO: 2860 - DNA, 7 bp, artificial
  LNA Oligomer
agcattt

SEQ ID NO: 2861 - DNA, 7 bp, artificial
  LNA Oligomer
gtagggt

SEQ ID NO: 2862 - DNA, 7 bp, artificial
  LNA Oligomer
ccactga

SEQ ID NO: 2863 - DNA, 7 bp, artificial
  LNA Oligomer
ctatcta

SEQ ID NO: 2864 - DNA, 7 bp, artificial
  LNA Oligomer
ggcatac

SEQ ID NO: 2865 - DNA, 7 bp, artificial
  LNA Oligomer
tcctctt

SEQ ID NO: 2866 - DNA, 7 bp, artificial
  LNA Oligomer
ttccgat

SEQ ID NO: 2867 - DNA, 7 bp, artificial
  LNA Oligomer
gaacttg

SEQ ID NO: 2868 - DNA, 7 bp, artificial
  LNA Oligomer
aaacaaa

SEQ ID NO: 2869 - DNA, 7 bp, artificial
  LNA Oligomer
gggaatg

SEQ ID NO: 2870 - DNA, 7 bp, artificial
  LNA Oligomer
cgctcct

SEQ ID NO: 2871 - DNA, 7 bp, artificial
  LNA Oligomer
agaaaat

SEQ ID NO: 2872 - DNA, 7 bp, artificial
  LNA Oligomer
ccttcat

SEQ ID NO: 2873 - DNA, 7 bp, artificial
  LNA Oligomer
gcctgct

SEQ ID NO: 2874 - DNA, 7 bp, artificial
  LNA Oligomer
gtggtgc

SEQ ID NO: 2875 - DNA, 7 bp, artificial
  LNA Oligomer
cactagg

SEQ ID NO: 2876 - DNA, 7 bp, artificial
  LNA Oligomer
atcaggt

SEQ ID NO: 2877 - DNA, 7 bp, artificial
  LNA Oligomer
tcacctt

SEQ ID NO: 2878 - DNA, 7 bp, artificial
  LNA Oligomer
gatcccc

SEQ ID NO: 2879 - DNA, 7 bp, artificial
  LNA Oligomer
caacctt

SEQ ID NO: 2880 - DNA, 7 bp, artificial
  LNA Oligomer
ctatgat

SEQ ID NO: 2881 - DNA, 7 bp, artificial
  LNA Oligomer
ggtccag

SEQ ID NO: 2882 - DNA, 7 bp, artificial
  LNA Oligomer
aaaccgt

SEQ ID NO: 2883 - DNA, 7 bp, artificial
  LNA Oligomer
attgtga

SEQ ID NO: 2884 - DNA, 7 bp, artificial
  LNA Oligomer
aagtgtt

SEQ ID NO: 2885 - DNA, 7 bp, artificial
  LNA Oligomer
gtccagt

SEQ ID NO: 2886 - DNA, 7 bp, artificial
  LNA Oligomer
tcaggtt

SEQ ID NO: 2887 - DNA, 7 bp, artificial
  LNA Oligomer
aaaagat

SEQ ID NO: 2888 - DNA, 7 bp, artificial
  LNA Oligomer
cagaatt

SEQ ID NO: 2889 - DNA, 7 bp, artificial
  LNA Oligomer
tcccgtt

SEQ ID NO: 2890 - DNA, 7 bp, artificial
  LNA Oligomer
cgtcact

SEQ ID NO: 2891 - DNA, 7 bp, artificial
  LNA Oligomer
gaggacg

SEQ ID NO: 2892 - DNA, 7 bp, artificial
  LNA Oligomer
gctagtt

SEQ ID NO: 2893 - DNA, 7 bp, artificial
  LNA Oligomer
tctggtg

SEQ ID NO: 2894 - DNA, 7 bp, artificial
  LNA Oligomer
ttcaacg

SEQ ID NO: 2895 - DNA, 7 bp, artificial
  LNA Oligomer
cctggaa

SEQ ID NO: 2896 - DNA, 7 bp, artificial
  LNA Oligomer
ccatccc

SEQ ID NO: 2897 - DNA, 7 bp, artificial
  LNA Oligomer
gagacgc

SEQ ID NO: 2898 - DNA, 7 bp, artificial
  LNA Oligomer
gagcggt

SEQ ID NO: 2899 - DNA, 7 bp, artificial
  LNA Oligomer
cgttcgg

SEQ ID NO: 2900 - DNA, 7 bp, artificial
  LNA Oligomer
aagtgga

SEQ ID NO: 2901 - DNA, 7 bp, artificial
  LNA Oligomer
agaccgc

SEQ ID NO: 2902 - DNA, 7 bp, artificial
  LNA Oligomer
gaccgtg

SEQ ID NO: 2903 - DNA, 7 bp, artificial
  LNA Oligomer
gcacaat

SEQ ID NO: 2904 - DNA, 7 bp, artificial
  LNA Oligomer
ccatgtc

SEQ ID NO: 2905 - DNA, 7 bp, artificial
  LNA Oligomer
gcttgtc

SEQ ID NO: 2906 - DNA, 7 bp, artificial
  LNA Oligomer
tatcata

SEQ ID NO: 2907 - DNA, 7 bp, artificial
  LNA Oligomer
ctacctc

SEQ ID NO: 2908 - DNA, 7 bp, artificial
  LNA Oligomer
ttgtata

SEQ ID NO: 2909 - DNA, 7 bp, artificial
  LNA Oligomer
ctacctc

SEQ ID NO: 2910 - DNA, 7 bp, artificial
  LNA Oligomer
ttgtata

SEQ ID NO: 2911 - DNA, 7 bp, artificial
  LNA Oligomer
ctacctc

SEQ ID NO: 2912 - DNA, 7 bp, artificial
  LNA Oligomer
taactct

SEQ ID NO: 2913 - DNA, 7 bp, artificial
  LNA Oligomer
ctacctc

SEQ ID NO: 2914 - DNA, 7 bp, artificial
  LNA Oligomer
tcgtata

SEQ ID NO: 2915 - DNA, 7 bp, artificial
  LNA Oligomer
ctacctc

SEQ ID NO: 2916 - DNA, 7 bp, artificial
  LNA Oligomer
ccgtata

SEQ ID NO: 2917 - DNA, 7 bp, artificial
  LNA Oligomer
ctacctc

SEQ ID NO: 2918 - DNA, 7 bp, artificial
  LNA Oligomer
ttgtata

SEQ ID NO: 2919 - DNA, 7 bp, artificial
  LNA Oligomer
ctgtata

SEQ ID NO: 2920 - DNA, 7 bp, artificial
  LNA Oligomer
ctacctc

SEQ ID NO: 2921 - DNA, 7 bp, artificial
  LNA Oligomer
ctgtaca

SEQ ID NO: 2922 - DNA, 7 bp, artificial
  LNA Oligomer
ctacctc

SEQ ID NO: 2923 - DNA, 7 bp, artificial
  LNA Oligomer
ttgcgca

SEQ ID NO: 2924 - DNA, 7 bp, artificial
  LNA Oligomer
acattcc

SEQ ID NO: 2925 - DNA, 7 bp, artificial
  LNA Oligomer
tacgggt

SEQ ID NO: 2926 - DNA, 7 bp, artificial
  LNA Oligomer
caagctt

SEQ ID NO: 2927 - DNA, 7 bp, artificial
  LNA Oligomer
gtactgt

SEQ ID NO: 2928 - DNA, 7 bp, artificial
  LNA Oligomer
gataact

SEQ ID NO: 2929 - DNA, 7 bp, artificial
  LNA Oligomer
atgctgc

SEQ ID NO: 2930 - DNA, 7 bp, artificial
  LNA Oligomer
ggctatg

SEQ ID NO: 2931 - DNA, 7 bp, artificial
  LNA Oligomer
gcatttg

SEQ ID NO: 2932 - DNA, 7 bp, artificial
  LNA Oligomer
acatccg

SEQ ID NO: 2933 - DNA, 7 bp, artificial
  LNA Oligomer
gcacttt

SEQ ID NO: 2934 - DNA, 7 bp, artificial
  LNA Oligomer
cattgca

SEQ ID NO: 2935 - DNA, 7 bp, artificial
  LNA Oligomer
gcacttt

SEQ ID NO: 2936 - DNA, 7 bp, artificial
  LNA Oligomer
cagtgcg

SEQ ID NO: 2937 - DNA, 7 bp, artificial
  LNA Oligomer
atgctgc

SEQ ID NO: 2938 - DNA, 7 bp, artificial
  LNA Oligomer
acagggt

SEQ ID NO: 2939 - DNA, 7 bp, artificial
  LNA Oligomer
cgaattt

SEQ ID NO: 2940 - DNA, 7 bp, artificial
  LNA Oligomer
acagggt

SEQ ID NO: 2941 - DNA, 7 bp, artificial
  LNA Oligomer
gaatctg

SEQ ID NO: 2942 - DNA, 7 bp, artificial
  LNA Oligomer
gtgagca

SEQ ID NO: 2943 - DNA, 7 bp, artificial
  LNA Oligomer
gaatgct

SEQ ID NO: 2944 - DNA, 7 bp, artificial
  LNA Oligomer
gccggaa

SEQ ID NO: 2945 - DNA, 7 bp, artificial
  LNA Oligomer
ggcgacg

SEQ ID NO: 2946 - DNA, 7 bp, artificial
  LNA Oligomer
agaccct

SEQ ID NO: 2947 - DNA, 7 bp, artificial
  LNA Oligomer
ctacagt

SEQ ID NO: 2948 - DNA, 7 bp, artificial
  LNA Oligomer
gctgcag

SEQ ID NO: 2949 - DNA, 7 bp, artificial
  LNA Oligomer
tatcctc

SEQ ID NO: 2950 - DNA, 7 bp, artificial
  LNA Oligomer
gtgtcct

SEQ ID NO: 2951 - DNA, 7 bp, artificial
  LNA Oligomer
ctcagga

SEQ ID NO: 2952 - DNA, 7 bp, artificial
  LNA Oligomer
atcaggc

SEQ ID NO: 2953 - DNA, 7 bp, artificial
  LNA Oligomer
gctggca

SEQ ID NO: 2954 - DNA, 7 bp, artificial
  LNA Oligomer
gctccgg

SEQ ID NO: 2955 - DNA, 7 bp, artificial
  LNA Oligomer
ggccacg

SEQ ID NO: 2956 - DNA, 7 bp, artificial
  LNA Oligomer
cctgcag

SEQ ID NO: 2957 - DNA, 7 bp, artificial
  LNA Oligomer
catgaac

SEQ ID NO: 2958 - DNA, 7 bp, artificial
  LNA Oligomer
ccagctg

SEQ ID NO: 2959 - DNA, 7 bp, artificial
  LNA Oligomer
ccctgcc

SEQ ID NO: 2960 - DNA, 7 bp, artificial
  LNA Oligomer
aacagtg

SEQ ID NO: 2961 - DNA, 7 bp, artificial
  LNA Oligomer
acactcc

SEQ ID NO: 2962 - DNA, 7 bp, artificial
  LNA Oligomer
atggcgt

SEQ ID NO: 2963 - DNA, 7 bp, artificial
  LNA Oligomer
aggtggg

SEQ ID NO: 2964 - DNA, 7 bp, artificial
  LNA Oligomer
gtcctca

SEQ ID NO: 2965 - DNA, 7 bp, artificial
  LNA Oligomer
ggggctc

SEQ ID NO: 2966 - DNA, 7 bp, artificial
  LNA Oligomer
gtaccca

SEQ ID NO: 2967 - DNA, 7 bp, artificial
  LNA Oligomer
gctggtg

SEQ ID NO: 2968 - DNA, 7 bp, artificial
  LNA Oligomer
gccctca

SEQ ID NO: 2969 - DNA, 7 bp, artificial
  LNA Oligomer
gtggcac

SEQ ID NO: 2970 - DNA, 7 bp, artificial
  LNA Oligomer
aggtgtg

SEQ ID NO: 2971 - DNA, 7 bp, artificial
  LNA Oligomer
ccgccca

SEQ ID NO: 2972 - DNA, 7 bp, artificial
  LNA Oligomer
ggtgaga

SEQ ID NO: 2973 - DNA, 7 bp, artificial
  LNA Oligomer
ccagaca

SEQ ID NO: 2974 - DNA, 7 bp, artificial
  LNA Oligomer
agggctc

SEQ ID NO: 2975 - DNA, 7 bp, artificial
  LNA Oligomer
caggccg

SEQ ID NO: 2976 - DNA, 7 bp, artificial
  LNA Oligomer
ggaagag

SEQ ID NO: 2977 - DNA, 7 bp, artificial
  LNA Oligomer
cagaagg

SEQ ID NO: 2978 - DNA, 7 bp, artificial
  LNA Oligomer
cgaggaa

SEQ ID NO: 2979 - DNA, 7 bp, artificial
  LNA Oligomer
gtgcctt

SEQ ID NO: 2980 - DNA, 7 bp, artificial
  LNA Oligomer
tgaacac

SEQ ID NO: 2981 - DNA, 7 bp, artificial
  LNA Oligomer
atccagt

SEQ ID NO: 2982 - DNA, 7 bp, artificial
  LNA Oligomer
aactact

SEQ ID NO: 2983 - DNA, 7 bp, artificial
  LNA Oligomer
gatcact

SEQ ID NO: 2984 - DNA, 7 bp, artificial
  LNA Oligomer
aatccat

SEQ ID NO: 2985 - DNA, 7 bp, artificial
  LNA Oligomer
ggacggg

SEQ ID NO: 2986 - DNA, 7 bp, artificial
  LNA Oligomer
aagaagg

SEQ ID NO: 2987 - DNA, 7 bp, artificial
  LNA Oligomer
aagggcg

SEQ ID NO: 2988 - DNA, 7 bp, artificial
  LNA Oligomer
agcaccg

SEQ ID NO: 2989 - DNA, 7 bp, artificial
  LNA Oligomer
gctagag

SEQ ID NO: 2990 - DNA, 7 bp, artificial
  LNA Oligomer
ttccttc

SEQ ID NO: 2991 - DNA, 7 bp, artificial
  LNA Oligomer
tcttctc

SEQ ID NO: 2992 - DNA, 7 bp, artificial
  LNA Oligomer
tccaggc

SEQ ID NO: 2993 - DNA, 7 bp, artificial
  LNA Oligomer
ctcatcc

SEQ ID NO: 2994 - DNA, 7 bp, artificial
  LNA Oligomer
ctcatcc

SEQ ID NO: 2995 - DNA, 7 bp, artificial
  LNA Oligomer
caatgcc

SEQ ID NO: 2996 - DNA, 7 bp, artificial
  LNA Oligomer
cattcac

SEQ ID NO: 2997 - DNA, 7 bp, artificial
  LNA Oligomer
tcctaac

SEQ ID NO: 2998 - DNA, 7 bp, artificial
  LNA Oligomer
tcatata

SEQ ID NO: 2999 - DNA, 7 bp, artificial
  LNA Oligomer
tcacctg

SEQ ID NO: 3000 - DNA, 7 bp, artificial
  LNA Oligomer
ctcaggg

SEQ ID NO: 3001 - DNA, 7 bp, artificial
  LNA Oligomer
ctcaggg

SEQ ID NO: 3002 - DNA, 7 bp, artificial
  LNA Oligomer
taacccg

SEQ ID NO: 3003 - DNA, 7 bp, artificial
  LNA Oligomer
acttgtg

SEQ ID NO: 3004 - DNA, 7 bp, artificial
  LNA Oligomer
cggtacg

SEQ ID NO: 3005 - DNA, 7 bp, artificial
  LNA Oligomer
taataat

SEQ ID NO: 3006 - DNA, 7 bp, artificial
  LNA Oligomer
ggtggga

SEQ ID NO: 3007 - DNA, 7 bp, artificial
  LNA Oligomer
ttatcca

SEQ ID NO: 3008 - DNA, 7 bp, artificial
  LNA Oligomer
tcaccca

SEQ ID NO: 3009 - DNA, 7 bp, artificial
  LNA Oligomer
ggtacca

SEQ ID NO: 3010 - DNA, 7 bp, artificial
  LNA Oligomer
aagactt

SEQ ID NO: 3011 - DNA, 7 bp, artificial
  LNA Oligomer
acatcct

SEQ ID NO: 3012 - DNA, 7 bp, artificial
  LNA Oligomer
ccctgag

SEQ ID NO: 3013 - DNA, 7 bp, artificial
  LNA Oligomer
tcaacag

SEQ ID NO: 3014 - DNA, 7 bp, artificial
  LNA Oligomer
cacgccc

SEQ ID NO: 3015 - DNA, 7 bp, artificial
  LNA Oligomer
cagtcca

SEQ ID NO: 3016 - DNA, 7 bp, artificial
  LNA Oligomer
ggatccg

SEQ ID NO: 3017 - DNA, 7 bp, artificial
  LNA Oligomer
agcttca

SEQ ID NO: 3018 - DNA, 7 bp, artificial
  LNA Oligomer
atctcca

SEQ ID NO: 3019 - DNA, 7 bp, artificial
  LNA Oligomer
gtgccaa

SEQ ID NO: 3020 - DNA, 7 bp, artificial
  LNA Oligomer
tcatcat

SEQ ID NO: 3021 - DNA, 7 bp, artificial
  LNA Oligomer
tgtcgcc

SEQ ID NO: 3022 - DNA, 7 bp, artificial
  LNA Oligomer
acaggga

SEQ ID NO: 3023 - DNA, 7 bp, artificial
  LNA Oligomer
aacaggg

SEQ ID NO: 3024 - DNA, 7 bp, artificial
  LNA Oligomer
tccccca

SEQ ID NO: 3025 - DNA, 7 bp, artificial
  LNA Oligomer
gctcttt

SEQ ID NO: 3026 - DNA, 7 bp, artificial
  LNA Oligomer
tctacgt

SEQ ID NO: 3027 - DNA, 7 bp, artificial
  LNA Oligomer
cagtact

SEQ ID NO: 3028 - DNA, 7 bp, artificial
  LNA Oligomer
caatatg

SEQ ID NO: 3029 - DNA, 7 bp, artificial
  LNA Oligomer
cactgtg

SEQ ID NO: 3030 - DNA, 7 bp, artificial
  LNA Oligomer
cggtggg

SEQ ID NO: 3031 - DNA, 7 bp, artificial
  LNA Oligomer
ggaggcg

SEQ ID NO: 3032 - DNA, 7 bp, artificial
  LNA Oligomer
gcaaacg

SEQ ID NO: 3033 - DNA, 7 bp, artificial
  LNA Oligomer
tttgtag

SEQ ID NO: 3034 - DNA, 7 bp, artificial
  LNA Oligomer
tgtatag

SEQ ID NO: 3035 - DNA, 7 bp, artificial
  LNA Oligomer
tgcccag

SEQ ID NO: 3036 - DNA, 7 bp, artificial
  LNA Oligomer
gtcctgc

SEQ ID NO: 3037 - DNA, 7 bp, artificial
  LNA Oligomer
atccagc

SEQ ID NO: 3038 - DNA, 7 bp, artificial
  LNA Oligomer
gcagtcc

SEQ ID NO: 3039 - DNA, 7 bp, artificial
  LNA Oligomer
ggactcc

SEQ ID NO: 3040 - DNA, 7 bp, artificial
  LNA Oligomer
aagggct

SEQ ID NO: 3041 - DNA, 7 bp, artificial
  LNA Oligomer
aagggct

SEQ ID NO: 3042 - DNA, 7 bp, artificial
  LNA Oligomer
gcaaaaa

SEQ ID NO: 3043 - DNA, 7 bp, artificial
  LNA Oligomer
aaaatcc

SEQ ID NO: 3044 - DNA, 7 bp, artificial
  LNA Oligomer
cagggcc

SEQ ID NO: 3045 - DNA, 7 bp, artificial
  LNA Oligomer
cgttccc

SEQ ID NO: 3046 - DNA, 7 bp, artificial
  LNA Oligomer
accaccc

SEQ ID NO: 3047 - DNA, 7 bp, artificial
  LNA Oligomer
acctcac

SEQ ID NO: 3048 - DNA, 7 bp, artificial
  LNA Oligomer
cggccta

SEQ ID NO: 3049 - DNA, 7 bp, artificial
  LNA Oligomer
ggcccta

SEQ ID NO: 3050 - DNA, 7 bp, artificial
  LNA Oligomer
tacttga

SEQ ID NO: 3051 - DNA, 7 bp, artificial
  LNA Oligomer
cgaatga

SEQ ID NO: 3052 - DNA, 7 bp, artificial
  LNA Oligomer
ttccaga

SEQ ID NO: 3053 - DNA, 7 bp, artificial
  LNA Oligomer
cttctca

SEQ ID NO: 3054 - DNA, 7 bp, artificial
  LNA Oligomer
agctgca

SEQ ID NO: 3055 - DNA, 7 bp, artificial
  LNA Oligomer
tgtccca

SEQ ID NO: 3056 - DNA, 7 bp, artificial
  LNA Oligomer
tctctaa

SEQ ID NO: 3057 - DNA, 7 bp, artificial
  LNA Oligomer
gcctcaa

SEQ ID NO: 3058 - DNA, 7 bp, artificial
  LNA Oligomer
gttgaaa

SEQ ID NO: 3059 - DNA, 7 bp, artificial
  LNA Oligomer
gccaacg

SEQ ID NO: 3060 - DNA, 7 bp, artificial
  LNA Oligomer
cgccgag

SEQ ID NO: 3061 - DNA, 7 bp, artificial
  LNA Oligomer
acccatg

SEQ ID NO: 3062 - DNA, 7 bp, artificial
  LNA Oligomer
ttgcact

SEQ ID NO: 3063 - DNA, 7 bp, artificial
  LNA Oligomer
aatgtga

SEQ ID NO: 3064 - DNA, 7 bp, artificial
  LNA Oligomer
ttgcact

SEQ ID NO: 3065 - DNA, 7 bp, artificial
  LNA Oligomer
gaaagag

SEQ ID NO: 3066 - DNA, 7 bp, artificial
  LNA Oligomer
gactgtt

SEQ ID NO: 3067 - DNA, 7 bp, artificial
  LNA Oligomer
gccacgg

SEQ ID NO: 3068 - DNA, 7 bp, artificial
  LNA Oligomer
cctccct

SEQ ID NO: 3069 - DNA, 7 bp, artificial
  LNA Oligomer
gcatcat

SEQ ID NO: 3070 - DNA, 7 bp, artificial
  LNA Oligomer
agttttg

SEQ ID NO: 3071 - DNA, 7 bp, artificial
  LNA Oligomer
ctgtctg

SEQ ID NO: 3072 - DNA, 7 bp, artificial
  LNA Oligomer
ggaccaa

SEQ ID NO: 3073 - DNA, 7 bp, artificial
  LNA Oligomer
ggaccaa

SEQ ID NO: 3074 - DNA, 7 bp, artificial
  LNA Oligomer
cagtcac

SEQ ID NO: 3075 - DNA, 7 bp, artificial
  LNA Oligomer
aagccat

SEQ ID NO: 3076 - DNA, 7 bp, artificial
  LNA Oligomer
tccctat

SEQ ID NO: 3077 - DNA, 7 bp, artificial
  LNA Oligomer
aagccat

SEQ ID NO: 3078 - DNA, 7 bp, artificial
  LNA Oligomer
ccctaca

SEQ ID NO: 3079 - DNA, 7 bp, artificial
  LNA Oligomer
aatggag

SEQ ID NO: 3080 - DNA, 7 bp, artificial
  LNA Oligomer
cgatgat

SEQ ID NO: 3081 - DNA, 7 bp, artificial
  LNA Oligomer
agcaata

SEQ ID NO: 3082 - DNA, 7 bp, artificial
  LNA Oligomer
caccagc

SEQ ID NO: 3083 - DNA, 7 bp, artificial
  LNA Oligomer
gaagtag

SEQ ID NO: 3084 - DNA, 7 bp, artificial
  LNA Oligomer
gaaatag

SEQ ID NO: 3085 - DNA, 7 bp, artificial
  LNA Oligomer
gcgtctc

SEQ ID NO: 3086 - DNA, 7 bp, artificial
  LNA Oligomer
actgtag

SEQ ID NO: 3087 - DNA, 7 bp, artificial
  LNA Oligomer
ctgtggt

SEQ ID NO: 3088 - DNA, 7 bp, artificial
  LNA Oligomer
aaccact

SEQ ID NO: 3089 - DNA, 7 bp, artificial
  LNA Oligomer
cagtgtt

SEQ ID NO: 3090 - DNA, 7 bp, artificial
  LNA Oligomer
ggaagat

SEQ ID NO: 3091 - DNA, 7 bp, artificial
  LNA Oligomer
acactac

SEQ ID NO: 3092 - DNA, 7 bp, artificial
  LNA Oligomer
actttat

SEQ ID NO: 3093 - DNA, 7 bp, artificial
  LNA Oligomer
tcatctc

SEQ ID NO: 3094 - DNA, 7 bp, artificial
  LNA Oligomer
actgcac

SEQ ID NO: 3095 - DNA, 7 bp, artificial
  LNA Oligomer
atactgt

SEQ ID NO: 3096 - DNA, 7 bp, artificial
  LNA Oligomer
tgatatc

SEQ ID NO: 3097 - DNA, 7 bp, artificial
  LNA Oligomer
aactgga

SEQ ID NO: 3098 - DNA, 7 bp, artificial
  LNA Oligomer
aggaatc

SEQ ID NO: 3099 - DNA, 7 bp, artificial
  LNA Oligomer
aaacgga

SEQ ID NO: 3100 - DNA, 7 bp, artificial
  LNA Oligomer
gcgccga

SEQ ID NO: 3101 - DNA, 7 bp, artificial
  LNA Oligomer
agttctc

SEQ ID NO: 3102 - DNA, 7 bp, artificial
  LNA Oligomer
ttcagag

SEQ ID NO: 3103 - DNA, 7 bp, artificial
  LNA Oligomer
acagggc

SEQ ID NO: 3104 - DNA, 7 bp, artificial
  LNA Oligomer
agttctc

SEQ ID NO: 3105 - DNA, 7 bp, artificial
  LNA Oligomer
ccacaca

SEQ ID NO: 3106 - DNA, 7 bp, artificial
  LNA Oligomer
cggaggg

SEQ ID NO: 3107 - DNA, 7 bp, artificial
  LNA Oligomer
acgcggg

SEQ ID NO: 3108 - DNA, 7 bp, artificial
  LNA Oligomer
ccgcaca

SEQ ID NO: 3109 - DNA, 7 bp, artificial
  LNA Oligomer
tgcactg

SEQ ID NO: 3110 - DNA, 7 bp, artificial
  LNA Oligomer
agaactt

SEQ ID NO: 3111 - DNA, 7 bp, artificial
  LNA Oligomer
tgcactg

SEQ ID NO: 3112 - DNA, 7 bp, artificial
  LNA Oligomer
cagaact

SEQ ID NO: 3113 - DNA, 7 bp, artificial
  LNA Oligomer
gagccag

SEQ ID NO: 3114 - DNA, 7 bp, artificial
  LNA Oligomer
ccctccc

SEQ ID NO: 3115 - DNA, 7 bp, artificial
  LNA Oligomer
ttgggag

SEQ ID NO: 3116 - DNA, 7 bp, artificial
  LNA Oligomer
tgtacca

SEQ ID NO: 3117 - DNA, 7 bp, artificial
  LNA Oligomer
cagtcta

SEQ ID NO: 3118 - DNA, 7 bp, artificial
  LNA Oligomer
ctcctcg

SEQ ID NO: 3119 - DNA, 7 bp, artificial
  LNA Oligomer
tgcactg

SEQ ID NO: 3120 - DNA, 7 bp, artificial
  LNA Oligomer
ctatgca

SEQ ID NO: 3121 - DNA, 7 bp, artificial
  LNA Oligomer
acggttt

SEQ ID NO: 3122 - DNA, 7 bp, artificial
  LNA Oligomer
ccgggcc

SEQ ID NO: 3123 - DNA, 7 bp, artificial
  LNA Oligomer
gcgcagg

SEQ ID NO: 3124 - DNA, 7 bp, artificial
  LNA Oligomer
ataacct

SEQ ID NO: 3125 - DNA, 7 bp, artificial
  LNA Oligomer
gtatgat

SEQ ID NO: 3126 - DNA, 7 bp, artificial
  LNA Oligomer
agcatta

SEQ ID NO: 3127 - DNA, 7 bp, artificial
  LNA Oligomer
tgtagga

SEQ ID NO: 3128 - DNA, 7 bp, artificial
  LNA Oligomer
tgctgct

SEQ ID NO: 3129 - DNA, 7 bp, artificial
  LNA Oligomer
atggcct

SEQ ID NO: 3130 - DNA, 7 bp, artificial
  LNA Oligomer
tgctgct

SEQ ID NO: 3131 - DNA, 7 bp, artificial
  LNA Oligomer
atgattc

SEQ ID NO: 3132 - DNA, 7 bp, artificial
  LNA Oligomer
tgctgct

SEQ ID NO: 3133 - DNA, 7 bp, artificial
  LNA Oligomer
aatactg

SEQ ID NO: 3134 - DNA, 7 bp, artificial
  LNA Oligomer
aatattg

SEQ ID NO: 3135 - DNA, 7 bp, artificial
  LNA Oligomer
gcacttt

SEQ ID NO: 3136 - DNA, 7 bp, artificial
  LNA Oligomer
actgcag

SEQ ID NO: 3137 - DNA, 7 bp, artificial
  LNA Oligomer
tgaatgt

SEQ ID NO: 3138 - DNA, 7 bp, artificial
  LNA Oligomer
tcgatgg

SEQ ID NO: 3139 - DNA, 7 bp, artificial
  LNA Oligomer
tcagtgg

SEQ ID NO: 3140 - DNA, 7 bp, artificial
  LNA Oligomer
tgaatgt

SEQ ID NO: 3141 - DNA, 7 bp, artificial
  LNA Oligomer
tgaatgt

SEQ ID NO: 3142 - DNA, 7 bp, artificial
  LNA Oligomer
cgatggt

SEQ ID NO: 3143 - DNA, 7 bp, artificial
  LNA Oligomer
tgaatgt

SEQ ID NO: 3144 - DNA, 7 bp, artificial
  LNA Oligomer
ttgccaa

SEQ ID NO: 3145 - DNA, 7 bp, artificial
  LNA Oligomer
tagaacc

SEQ ID NO: 3146 - DNA, 7 bp, artificial
  LNA Oligomer
gcactgg

SEQ ID NO: 3147 - DNA, 7 bp, artificial
  LNA Oligomer
tgatcaa

SEQ ID NO: 3148 - DNA, 7 bp, artificial
  LNA Oligomer
ctgcctc

SEQ ID NO: 3149 - DNA, 7 bp, artificial
  LNA Oligomer
gtgccat

SEQ ID NO: 3150 - DNA, 7 bp, artificial
  LNA Oligomer
taattca

SEQ ID NO: 3151 - DNA, 7 bp, artificial
  LNA Oligomer
tccgtcc

SEQ ID NO: 3152 - DNA, 7 bp, artificial
  LNA Oligomer
tctctcc

SEQ ID NO: 3153 - DNA, 7 bp, artificial
  LNA Oligomer
cagcccc

SEQ ID NO: 3154 - DNA, 7 bp, artificial
  LNA Oligomer
attcttt

SEQ ID NO: 3155 - DNA, 7 bp, artificial
  LNA Oligomer
ctttggg

SEQ ID NO: 3156 - DNA, 7 bp, artificial
  LNA Oligomer
agacacg

SEQ ID NO: 3157 - DNA, 7 bp, artificial
  LNA Oligomer
ttgtagc

SEQ ID NO: 3158 - DNA, 7 bp, artificial
  LNA Oligomer
tgtggga

SEQ ID NO: 3159 - DNA, 7 bp, artificial
  LNA Oligomer
aagggat

SEQ ID NO: 3160 - DNA, 7 bp, artificial
  LNA Oligomer
gcacctt

SEQ ID NO: 3161 - DNA, 7 bp, artificial
  LNA Oligomer
agggcag

SEQ ID NO: 3162 - DNA, 7 bp, artificial
  LNA Oligomer
gcacctt

SEQ ID NO: 3163 - DNA, 7 bp, artificial
  LNA Oligomer
ttagggc

SEQ ID NO: 3164 - DNA, 7 bp, artificial
  LNA Oligomer
acatatc

SEQ ID NO: 3165 - DNA, 7 bp, artificial
  LNA Oligomer
ccccgcc

SEQ ID NO: 3166 - DNA, 7 bp, artificial
  LNA Oligomer
cccctgc

SEQ ID NO: 3167 - DNA, 7 bp, artificial
  LNA Oligomer
ggcactc

SEQ ID NO: 3168 - DNA, 7 bp, artificial
  LNA Oligomer
acatatc

SEQ ID NO: 3169 - DNA, 7 bp, artificial
  LNA Oligomer
ttccgtt

SEQ ID NO: 3170 - DNA, 7 bp, artificial
  LNA Oligomer
agcgcag

SEQ ID NO: 3171 - DNA, 7 bp, artificial
  LNA Oligomer
aggactg

SEQ ID NO: 3172 - DNA, 7 bp, artificial
  LNA Oligomer
ggtactc

SEQ ID NO: 3173 - DNA, 7 bp, artificial
  LNA Oligomer
gcctggt

SEQ ID NO: 3174 - DNA, 7 bp, artificial
  LNA Oligomer
tctgggt

SEQ ID NO: 3175 - DNA, 7 bp, artificial
  LNA Oligomer
ggggcag

SEQ ID NO: 3176 - DNA, 7 bp, artificial
  LNA Oligomer
gcacagg

SEQ ID NO: 3177 - DNA, 7 bp, artificial
  LNA Oligomer
acccctc

SEQ ID NO: 3178 - DNA, 7 bp, artificial
  LNA Oligomer
ccctggg

SEQ ID NO: 3179 - DNA, 7 bp, artificial
  LNA Oligomer
ggcaagg

SEQ ID NO: 3180 - DNA, 7 bp, artificial
  LNA Oligomer
taggtca

SEQ ID NO: 3181 - DNA, 7 bp, artificial
  LNA Oligomer
attggca

SEQ ID NO: 3182 - DNA, 7 bp, artificial
  LNA Oligomer
ggccagt

SEQ ID NO: 3183 - DNA, 7 bp, artificial
  LNA Oligomer
aagaccc

SEQ ID NO: 3184 - DNA, 7 bp, artificial
  LNA Oligomer
ggccagt

SEQ ID NO: 3185 - DNA, 7 bp, artificial
  LNA Oligomer
aaacccc

SEQ ID NO: 3186 - DNA, 7 bp, artificial
  LNA Oligomer
ctgttac

SEQ ID NO: 3187 - DNA, 7 bp, artificial
  LNA Oligomer
cccactg

SEQ ID NO: 3188 - DNA, 7 bp, artificial
  LNA Oligomer
tgctgct

SEQ ID NO: 3189 - DNA, 7 bp, artificial
  LNA Oligomer
aatattg

SEQ ID NO: 3190 - DNA, 7 bp, artificial
  LNA Oligomer
actacct

SEQ ID NO: 3191 - DNA, 7 bp, artificial
  LNA Oligomer
tgttgcc

SEQ ID NO: 3192 - DNA, 7 bp, artificial
  LNA Oligomer
actacct

SEQ ID NO: 3193 - DNA, 7 bp, artificial
  LNA Oligomer
gtggtga

SEQ ID NO: 3194 - DNA, 7 bp, artificial
  LNA Oligomer
tctggac

SEQ ID NO: 3195 - DNA, 7 bp, artificial
  LNA Oligomer
acactgg

SEQ ID NO: 3196 - DNA, 7 bp, artificial
  LNA Oligomer
actactg

SEQ ID NO: 3197 - DNA, 7 bp, artificial
  LNA Oligomer
acactgg

SEQ ID NO: 3198 - DNA, 7 bp, artificial
  LNA Oligomer
tttgcac

SEQ ID NO: 3199 - DNA, 7 bp, artificial
  LNA Oligomer
gcaaaac

SEQ ID NO: 3200 - DNA, 7 bp, artificial
  LNA Oligomer
tttgcac

SEQ ID NO: 3201 - DNA, 7 bp, artificial
  LNA Oligomer
gcaaaac

SEQ ID NO: 3202 - DNA, 7 bp, artificial
  LNA Oligomer
gcaaaac

SEQ ID NO: 3203 - DNA, 7 bp, artificial
  LNA Oligomer
cagtgtt

SEQ ID NO: 3204 - DNA, 7 bp, artificial
  LNA Oligomer
gtaagat

SEQ ID NO: 3205 - DNA, 7 bp, artificial
  LNA Oligomer
cagtatt

SEQ ID NO: 3206 - DNA, 7 bp, artificial
  LNA Oligomer
gtaagat

SEQ ID NO: 3207 - DNA, 7 bp, artificial
  LNA Oligomer
cagtatt

SEQ ID NO: 3208 - DNA, 7 bp, artificial
  LNA Oligomer
gtaagac

SEQ ID NO: 3209 - DNA, 7 bp, artificial
  LNA Oligomer
atacctc

SEQ ID NO: 3210 - DNA, 7 bp, artificial
  LNA Oligomer
catagga

SEQ ID NO: 3211 - DNA, 7 bp, artificial
  LNA Oligomer
catttca

SEQ ID NO: 3212 - DNA, 7 bp, artificial
  LNA Oligomer
aaaggga

SEQ ID NO: 3213 - DNA, 7 bp, artificial
  LNA Oligomer
atgaagg

SEQ ID NO: 3214 - DNA, 7 bp, artificial
  LNA Oligomer
acattcc

SEQ ID NO: 3215 - DNA, 7 bp, artificial
  LNA Oligomer
cgtctta

SEQ ID NO: 3216 - DNA, 7 bp, artificial
  LNA Oligomer
cgtctta

SEQ ID NO: 3217 - DNA, 7 bp, artificial
  LNA Oligomer
gcacttt

SEQ ID NO: 3218 - DNA, 7 bp, artificial
  LNA Oligomer
aatgcag

SEQ ID NO: 3219 - DNA, 7 bp, artificial
  LNA Oligomer
gcacttt

SEQ ID NO: 3220 - DNA, 7 bp, artificial
  LNA Oligomer
actacag

SEQ ID NO: 3221 - DNA, 7 bp, artificial
  LNA Oligomer
ataagct

SEQ ID NO: 3222 - DNA, 7 bp, artificial
  LNA Oligomer
tggtgtt

SEQ ID NO: 3223 - DNA, 7 bp, artificial
  LNA Oligomer
acgcaca

SEQ ID NO: 3224 - DNA, 7 bp, artificial
  LNA Oligomer
aaaggga

SEQ ID NO: 3225 - DNA, 7 bp, artificial
  LNA Oligomer
gactgtt

SEQ ID NO: 3226 - DNA, 7 bp, artificial
  LNA Oligomer
cctgctg

SEQ ID NO: 3227 - DNA, 7 bp, artificial
  LNA Oligomer
gacaggc

SEQ ID NO: 3228 - DNA, 7 bp, artificial
  LNA Oligomer
taggtca

SEQ ID NO: 3229 - DNA, 7 bp, artificial
  LNA Oligomer
tgagatt

SEQ ID NO: 3230 - DNA, 7 bp, artificial
  LNA Oligomer
agagatt

SEQ ID NO: 3231 - DNA, 7 bp, artificial
  LNA Oligomer
atgcagt

SEQ ID NO: 3232 - DNA, 7 bp, artificial
  LNA Oligomer
aagcaca

SEQ ID NO: 3233 - DNA, 7 bp, artificial
  LNA Oligomer
ggaacca

SEQ ID NO: 3234 - DNA, 7 bp, artificial
  LNA Oligomer
gaaccat

SEQ ID NO: 3235 - DNA, 7 bp, artificial
  LNA Oligomer
tcaactc

SEQ ID NO: 3236 - DNA, 7 bp, artificial
  LNA Oligomer
acaattc

SEQ ID NO: 3237 - DNA, 7 bp, artificial
  LNA Oligomer
gacaatc

SEQ ID NO: 3238 - DNA, 7 bp, artificial
  LNA Oligomer
ggcagct

SEQ ID NO: 3239 - DNA, 7 bp, artificial
  LNA Oligomer
gaagaac

SEQ ID NO: 3240 - DNA, 7 bp, artificial
  LNA Oligomer
cggtgtg

SEQ ID NO: 3241 - DNA, 7 bp, artificial
  LNA Oligomer
ggtggtg

SEQ ID NO: 3242 - DNA, 7 bp, artificial
  LNA Oligomer
ccctgtg

SEQ ID NO: 3243 - DNA, 7 bp, artificial
  LNA Oligomer
atgtagc

SEQ ID NO: 3244 - DNA, 7 bp, artificial
  LNA Oligomer
tgccagg

SEQ ID NO: 3245 - DNA, 7 bp, artificial
  LNA Oligomer
atgtagc

SEQ ID NO: 3246 - DNA, 7 bp, artificial
  LNA Oligomer
ctactga

SEQ ID NO: 3247 - DNA, 7 bp, artificial
  LNA Oligomer
aactgac

SEQ ID NO: 3248 - DNA, 7 bp, artificial
  LNA Oligomer
aatacac

SEQ ID NO: 3249 - DNA, 7 bp, artificial
  LNA Oligomer
gtgactt

SEQ ID NO: 3250 - DNA, 7 bp, artificial
  LNA Oligomer
aatgtga

SEQ ID NO: 3251 - DNA, 7 bp, artificial
  LNA Oligomer
ggaaccc

SEQ ID NO: 3252 - DNA, 7 bp, artificial
  LNA Oligomer
aatgtga

SEQ ID NO: 3253 - DNA, 7 bp, artificial
  LNA Oligomer
ggaaccc

SEQ ID NO: 3254 - DNA, 7 bp, artificial
  LNA Oligomer
ctgagcc

SEQ ID NO: 3255 - DNA, 7 bp, artificial
  LNA Oligomer
agtaggc

SEQ ID NO: 3256 - DNA, 7 bp, artificial
  LNA Oligomer
agtaggc

SEQ ID NO: 3257 - DNA, 7 bp, artificial
  LNA Oligomer
gtgcaat

SEQ ID NO: 3258 - DNA, 7 bp, artificial
  LNA Oligomer
ctccgcc

SEQ ID NO: 3259 - DNA, 7 bp, artificial
  LNA Oligomer
tacttga

SEQ ID NO: 3260 - DNA, 7 bp, artificial
  LNA Oligomer
agaatag

SEQ ID NO: 3261 - DNA, 7 bp, artificial
  LNA Oligomer
agaatag

SEQ ID NO: 3262 - DNA, 7 bp, artificial
  LNA Oligomer
tacttga

SEQ ID NO: 3263 - DNA, 7 bp, artificial
  LNA Oligomer
agaacag

SEQ ID NO: 3264 - DNA, 7 bp, artificial
  LNA Oligomer
actgtga

SEQ ID NO: 3265 - DNA, 7 bp, artificial
  LNA Oligomer
taagccc

SEQ ID NO: 3266 - DNA, 7 bp, artificial
  LNA Oligomer
actgtga

SEQ ID NO: 3267 - DNA, 7 bp, artificial
  LNA Oligomer
taagctc

SEQ ID NO: 3268 - DNA, 7 bp, artificial
  LNA Oligomer
atctagt

SEQ ID NO: 3269 - DNA, 7 bp, artificial
  LNA Oligomer
agctcct

SEQ ID NO: 3270 - DNA, 7 bp, artificial
  LNA Oligomer
caaccct

SEQ ID NO: 3271 - DNA, 7 bp, artificial
  LNA Oligomer
ggggccc

SEQ ID NO: 3272 - DNA, 7 bp, artificial
  LNA Oligomer
acataca

SEQ ID NO: 3273 - DNA, 7 bp, artificial
  LNA Oligomer
cttctgc

SEQ ID NO: 3274 - DNA, 7 bp, artificial
  LNA Oligomer
cccacat

SEQ ID NO: 3275 - DNA, 7 bp, artificial
  LNA Oligomer
gtaaacc

SEQ ID NO: 3276 - DNA, 7 bp, artificial
  LNA Oligomer
tggtgct

SEQ ID NO: 3277 - DNA, 7 bp, artificial
  LNA Oligomer
aaatcag

SEQ ID NO: 3278 - DNA, 7 bp, artificial
  LNA Oligomer
tggtgct

SEQ ID NO: 3279 - DNA, 7 bp, artificial
  LNA Oligomer
aaaccag

SEQ ID NO: 3280 - DNA, 7 bp, artificial
  LNA Oligomer
gaaacca

SEQ ID NO: 3281 - DNA, 7 bp, artificial
  LNA Oligomer
tggtgct

SEQ ID NO: 3282 - DNA, 7 bp, artificial
  LNA Oligomer
atcggtc

SEQ ID NO: 3283 - DNA, 7 bp, artificial
  LNA Oligomer
cttgtat

SEQ ID NO: 3284 - DNA, 7 bp, artificial
  LNA Oligomer
ttgcact

SEQ ID NO: 3285 - DNA, 7 bp, artificial
  LNA Oligomer
ttgcact

SEQ ID NO: 3286 - DNA, 7 bp, artificial
  LNA Oligomer
agcactt

SEQ ID NO: 3287 - DNA, 7 bp, artificial
  LNA Oligomer
gtttaag

SEQ ID NO: 3288 - DNA, 7 bp, artificial
  LNA Oligomer
agcactt

SEQ ID NO: 3289 - DNA, 7 bp, artificial
  LNA Oligomer
gttaaag

SEQ ID NO: 3290 - DNA, 7 bp, artificial
  LNA Oligomer
agcactt

SEQ ID NO: 3291 - DNA, 7 bp, artificial
  LNA Oligomer
atgttaa

SEQ ID NO: 3292 - DNA, 7 bp, artificial
  LNA Oligomer
agcactt

SEQ ID NO: 3293 - DNA, 7 bp, artificial
  LNA Oligomer
gttaaag

SEQ ID NO: 3294 - DNA, 7 bp, artificial
  LNA Oligomer
agcactt

SEQ ID NO: 3295 - DNA, 7 bp, artificial
  LNA Oligomer
agcaatt

SEQ ID NO: 3296 - DNA, 7 bp, artificial
  LNA Oligomer
tgtttac

SEQ ID NO: 3297 - DNA, 7 bp, artificial
  LNA Oligomer
actgaaa

SEQ ID NO: 3298 - DNA, 7 bp, artificial
  LNA Oligomer
tgtttac

SEQ ID NO: 3299 - DNA, 7 bp, artificial
  LNA Oligomer
cctccca

SEQ ID NO: 3300 - DNA, 7 bp, artificial
  LNA Oligomer
tgtttac

SEQ ID NO: 3301 - DNA, 7 bp, artificial
  LNA Oligomer
tctccca

SEQ ID NO: 3302 - DNA, 7 bp, artificial
  LNA Oligomer
tctccca

SEQ ID NO: 3303 - DNA, 7 bp, artificial
  LNA Oligomer
tgtttac

SEQ ID NO: 3304 - DNA, 7 bp, artificial
  LNA Oligomer
actgaaa

SEQ ID NO: 3305 - DNA, 7 bp, artificial
  LNA Oligomer
tgtttac

SEQ ID NO: 3306 - DNA, 7 bp, artificial
  LNA Oligomer
actgaaa

SEQ ID NO: 3307 - DNA, 7 bp, artificial
  LNA Oligomer
tcttgcc

SEQ ID NO: 3308 - DNA, 7 bp, artificial
  LNA Oligomer
gcatagc

SEQ ID NO: 3309 - DNA, 7 bp, artificial
  LNA Oligomer
gtgcaat

SEQ ID NO: 3310 - DNA, 7 bp, artificial
  LNA Oligomer
ctaaatt

SEQ ID NO: 3311 - DNA, 7 bp, artificial
  LNA Oligomer
cagcttt

SEQ ID NO: 3312 - DNA, 7 bp, artificial
  LNA Oligomer
cagcttt

SEQ ID NO: 3313 - DNA, 7 bp, artificial
  LNA Oligomer
cagcttt

SEQ ID NO: 3314 - DNA, 7 bp, artificial
  LNA Oligomer
cagcttt

SEQ ID NO: 3315 - DNA, 7 bp, artificial
  LNA Oligomer
gtaatgt

SEQ ID NO: 3316 - DNA, 7 bp, artificial
  LNA Oligomer
gaccacc

SEQ ID NO: 3317 - DNA, 7 bp, artificial
  LNA Oligomer
ggggcag

SEQ ID NO: 3318 - DNA, 7 bp, artificial
  LNA Oligomer
gggatgc

SEQ ID NO: 3319 - DNA, 7 bp, artificial
  LNA Oligomer
ctactag

SEQ ID NO: 3320 - DNA, 7 bp, artificial
  LNA Oligomer
cccagag

SEQ ID NO: 3321 - DNA, 7 bp, artificial
  LNA Oligomer
agggcca

SEQ ID NO: 3322 - DNA, 7 bp, artificial
  LNA Oligomer
ggtgtgt

SEQ ID NO: 3323 - DNA, 7 bp, artificial
  LNA Oligomer
tgctttg

SEQ ID NO: 3324 - DNA, 7 bp, artificial
  LNA Oligomer
cccagag

SEQ ID NO: 3325 - DNA, 7 bp, artificial
  LNA Oligomer
ccagggg

SEQ ID NO: 3326 - DNA, 7 bp, artificial
  LNA Oligomer
ataccta

SEQ ID NO: 3327 - DNA, 7 bp, artificial
  LNA Oligomer
gctcttg

SEQ ID NO: 3328 - DNA, 7 bp, artificial
  LNA Oligomer
atgaaaa

SEQ ID NO: 3329 - DNA, 7 bp, artificial
  LNA Oligomer
tatagga

SEQ ID NO: 3330 - DNA, 7 bp, artificial
  LNA Oligomer
agccgtt

SEQ ID NO: 3331 - DNA, 7 bp, artificial
  LNA Oligomer
atgctgg

SEQ ID NO: 3332 - DNA, 7 bp, artificial
  LNA Oligomer
atattgt

SEQ ID NO: 3333 - DNA, 7 bp, artificial
  LNA Oligomer
ggcgctc

SEQ ID NO: 3334 - DNA, 7 bp, artificial
  LNA Oligomer
gacaggg

SEQ ID NO: 3335 - DNA, 7 bp, artificial
  LNA Oligomer
caatgca

SEQ ID NO: 3336 - DNA, 7 bp, artificial
  LNA Oligomer
aaacatt

SEQ ID NO: 3337 - DNA, 7 bp, artificial
  LNA Oligomer
caatgca

SEQ ID NO: 3338 - DNA, 7 bp, artificial
  LNA Oligomer
aggcact

SEQ ID NO: 3339 - DNA, 7 bp, artificial
  LNA Oligomer
ctttata

SEQ ID NO: 3340 - DNA, 7 bp, artificial
  LNA Oligomer
gagacgg

SEQ ID NO: 3341 - DNA, 7 bp, artificial
  LNA Oligomer
gtgtgag

SEQ ID NO: 3342 - DNA, 7 bp, artificial
  LNA Oligomer
gcacccc

SEQ ID NO: 3343 - DNA, 7 bp, artificial
  LNA Oligomer
gagtcag

SEQ ID NO: 3344 - DNA, 7 bp, artificial
  LNA Oligomer
ggcagac

SEQ ID NO: 3345 - DNA, 7 bp, artificial
  LNA Oligomer
cactgcc

SEQ ID NO: 3346 - DNA, 7 bp, artificial
  LNA Oligomer
gctgatt

SEQ ID NO: 3347 - DNA, 7 bp, artificial
  LNA Oligomer
agtgatt

SEQ ID NO: 3348 - DNA, 7 bp, artificial
  LNA Oligomer
actgcct

SEQ ID NO: 3349 - DNA, 7 bp, artificial
  LNA Oligomer
tagtgat

SEQ ID NO: 3350 - DNA, 7 bp, artificial
  LNA Oligomer
cactgcc

SEQ ID NO: 3351 - DNA, 7 bp, artificial
  LNA Oligomer
ctggggg

SEQ ID NO: 3352 - DNA, 7 bp, artificial
  LNA Oligomer
tctgata

SEQ ID NO: 3353 - DNA, 7 bp, artificial
  LNA Oligomer
ggtgtgt

SEQ ID NO: 3354 - DNA, 7 bp, artificial
  LNA Oligomer
caaggat

SEQ ID NO: 3355 - DNA, 7 bp, artificial
  LNA Oligomer
gtgcaat

SEQ ID NO: 3356 - DNA, 7 bp, artificial
  LNA Oligomer
tccaccc

SEQ ID NO: 3357 - DNA, 7 bp, artificial
  LNA Oligomer
gggcatt

SEQ ID NO: 3358 - DNA, 7 bp, artificial
  LNA Oligomer
gtgcaat

SEQ ID NO: 3359 - DNA, 7 bp, artificial
  LNA Oligomer
gcaacag

SEQ ID NO: 3360 - DNA, 7 bp, artificial
  LNA Oligomer
gtattat

SEQ ID NO: 3361 - DNA, 7 bp, artificial
  LNA Oligomer
gtcgatc

SEQ ID NO: 3362 - DNA, 7 bp, artificial
  LNA Oligomer
cagcagg

SEQ ID NO: 3363 - DNA, 7 bp, artificial
  LNA Oligomer
cggcact

SEQ ID NO: 3364 - DNA, 7 bp, artificial
  LNA Oligomer
gtttgag

SEQ ID NO: 3365 - DNA, 7 bp, artificial
  LNA Oligomer
agcactt

SEQ ID NO: 3366 - DNA, 7 bp, artificial
  LNA Oligomer
agcactt

SEQ ID NO: 3367 - DNA, 7 bp, artificial
  LNA Oligomer
ttttgag

SEQ ID NO: 3368 - DNA, 7 bp, artificial
  LNA Oligomer
tattata

SEQ ID NO: 3369 - DNA, 7 bp, artificial
  LNA Oligomer
ctgataa

SEQ ID NO: 3370 - DNA, 7 bp, artificial
  LNA Oligomer
tattata

SEQ ID NO: 3371 - DNA, 7 bp, artificial
  LNA Oligomer
ctgctaa

SEQ ID NO: 3372 - DNA, 7 bp, artificial
  LNA Oligomer
cgaacaa

SEQ ID NO: 3373 - DNA, 7 bp, artificial
  LNA Oligomer
tctatga

SEQ ID NO: 3374 - DNA, 7 bp, artificial
  LNA Oligomer
gaatcta

SEQ ID NO: 3375 - DNA, 7 bp, artificial
  LNA Oligomer
tctatga

SEQ ID NO: 3376 - DNA, 7 bp, artificial
  LNA Oligomer
tctatgt

SEQ ID NO: 3377 - DNA, 7 bp, artificial
  LNA Oligomer
tgtgtga

SEQ ID NO: 3378 - DNA, 7 bp, artificial
  LNA Oligomer
caacctc

SEQ ID NO: 3379 - DNA, 7 bp, artificial
  LNA Oligomer
agtccag

SEQ ID NO: 3380 - DNA, 7 bp, artificial
  LNA Oligomer
gtcagga

SEQ ID NO: 3381 - DNA, 7 bp, artificial
  LNA Oligomer
gtctacc

SEQ ID NO: 3382 - DNA, 7 bp, artificial
  LNA Oligomer
gttacat

SEQ ID NO: 3383 - DNA, 7 bp, artificial
  LNA Oligomer
attacat

SEQ ID NO: 3384 - DNA, 7 bp, artificial
  LNA Oligomer
gtcaacc

SEQ ID NO: 3385 - DNA, 7 bp, artificial
  LNA Oligomer
cttgtat

SEQ ID NO: 3386 - DNA, 7 bp, artificial
  LNA Oligomer
acaactt

SEQ ID NO: 3387 - DNA, 7 bp, artificial
  LNA Oligomer
tctgatc

SEQ ID NO: 3388 - DNA, 7 bp, artificial
  LNA Oligomer
ctaggaa

SEQ ID NO: 3389 - DNA, 7 bp, artificial
  LNA Oligomer
caacatt

SEQ ID NO: 3390 - DNA, 7 bp, artificial
  LNA Oligomer
ggtaacc

SEQ ID NO: 3391 - DNA, 7 bp, artificial
  LNA Oligomer
gttatat

SEQ ID NO: 3392 - DNA, 7 bp, artificial
  LNA Oligomer
gtctact

SEQ ID NO: 3393 - DNA, 7 bp, artificial
  LNA Oligomer
gttacat

SEQ ID NO: 3394 - DNA, 7 bp, artificial
  LNA Oligomer
ggtgaag

SEQ ID NO: 3395 - DNA, 7 bp, artificial
  LNA Oligomer
ctgttga

SEQ ID NO: 3396 - DNA, 7 bp, artificial
  LNA Oligomer
agtccag

SEQ ID NO: 3397 - DNA, 7 bp, artificial
  LNA Oligomer
accgagc

SEQ ID NO: 3398 - DNA, 7 bp, artificial
  LNA Oligomer
gcccctc

SEQ ID NO: 3399 - DNA, 7 bp, artificial
  LNA Oligomer
tgctgct

SEQ ID NO: 3400 - DNA, 7 bp, artificial
  LNA Oligomer
acgtttt

SEQ ID NO: 3401 - DNA, 7 bp, artificial
  LNA Oligomer
gtgtcat

SEQ ID NO: 3402 - DNA, 7 bp, artificial
  LNA Oligomer
ttcccga

SEQ ID NO: 3403 - DNA, 7 bp, artificial
  LNA Oligomer
cagtatt

SEQ ID NO: 3404 - DNA, 7 bp, artificial
  LNA Oligomer
gcaagac

SEQ ID NO: 3405 - DNA, 7 bp, artificial
  LNA Oligomer
acgacct

SEQ ID NO: 3406 - DNA, 7 bp, artificial
  LNA Oligomer
ctccaag

SEQ ID NO: 3407 - DNA, 7 bp, artificial
  LNA Oligomer
ccatcca

SEQ ID NO: 3408 - DNA, 7 bp, artificial
  LNA Oligomer
atcatga

SEQ ID NO: 3409 - DNA, 7 bp, artificial
  LNA Oligomer
atatgca

SEQ ID NO: 3410 - DNA, 7 bp, artificial
  LNA Oligomer
cactgcc

SEQ ID NO: 3411 - DNA, 7 bp, artificial
  LNA Oligomer
cactgcc

SEQ ID NO: 3412 - DNA, 7 bp, artificial
  LNA Oligomer
tcgcaaa

SEQ ID NO: 3413 - DNA, 7 bp, artificial
  LNA Oligomer
gatccca

SEQ ID NO: 3414 - DNA, 7 bp, artificial
  LNA Oligomer
ttgcaaa

SEQ ID NO: 3415 - DNA, 7 bp, artificial
  LNA Oligomer
aacggtt

SEQ ID NO: 3416 - DNA, 7 bp, artificial
  LNA Oligomer
aaacagt

SEQ ID NO: 3417 - DNA, 7 bp, artificial
  LNA Oligomer
cagatga

SEQ ID NO: 3418 - DNA, 7 bp, artificial
  LNA Oligomer
gacaacc

SEQ ID NO: 3419 - DNA, 7 bp, artificial
  LNA Oligomer
ttgcact

SEQ ID NO: 3420 - DNA, 7 bp, artificial
  LNA Oligomer
gataggg

SEQ ID NO: 3421 - DNA, 7 bp, artificial
  LNA Oligomer
tggactg

SEQ ID NO: 3422 - DNA, 7 bp, artificial
  LNA Oligomer
ggcacat

SEQ ID NO: 3423 - DNA, 7 bp, artificial
  LNA Oligomer
aggagtg

SEQ ID NO: 3424 - DNA, 7 bp, artificial
  LNA Oligomer
cccgtct

SEQ ID NO: 3425 - DNA, 7 bp, artificial
  LNA Oligomer
gagcctg

SEQ ID NO: 3426 - DNA, 7 bp, artificial
  LNA Oligomer
tgtatga

SEQ ID NO: 3427 - DNA, 7 bp, artificial
  LNA Oligomer
cagcctc

SEQ ID NO: 3428 - DNA, 7 bp, artificial
  LNA Oligomer
ctgcccc

SEQ ID NO: 3429 - DNA, 7 bp, artificial
  LNA Oligomer
gtacagg

SEQ ID NO: 3430 - DNA, 7 bp, artificial
  LNA Oligomer
gtatgat

SEQ ID NO: 3431 - DNA, 7 bp, artificial
  LNA Oligomer
gtacgat

SEQ ID NO: 3432 - DNA, 7 bp, artificial
  LNA Oligomer
cctttca

SEQ ID NO: 3433 - DNA, 7 bp, artificial
  LNA Oligomer
tatctgg

SEQ ID NO: 3434 - DNA, 7 bp, artificial
  LNA Oligomer
gatgtca

SEQ ID NO: 3435 - DNA, 7 bp, artificial
  LNA Oligomer
ccaggtt

SEQ ID NO: 3436 - DNA, 7 bp, artificial
  LNA Oligomer
atccatg

SEQ ID NO: 3437 - DNA, 7 bp, artificial
  LNA Oligomer
tgcataa

SEQ ID NO: 3438 - DNA, 7 bp, artificial
  LNA Oligomer
tccccac

SEQ ID NO: 3439 - DNA, 7 bp, artificial
  LNA Oligomer
caggtcc

SEQ ID NO: 3440 - DNA, 7 bp, artificial
  LNA Oligomer
gaccttc

SEQ ID NO: 3441 - DNA, 7 bp, artificial
  LNA Oligomer
atgtaca

SEQ ID NO: 3442 - DNA, 7 bp, artificial
  LNA Oligomer
atgtttc

SEQ ID NO: 3443 - DNA, 7 bp, artificial
  LNA Oligomer
gtttgtt

SEQ ID NO: 3444 - DNA, 7 bp, artificial
  LNA Oligomer
aatactc

SEQ ID NO: 3445 - DNA, 7 bp, artificial
  LNA Oligomer
tgctgct

SEQ ID NO: 3446 - DNA, 7 bp, artificial
  LNA Oligomer
gtggttt

SEQ ID NO: 3447 - DNA, 7 bp, artificial
  LNA Oligomer
gcttgaa

SEQ ID NO: 3448 - DNA, 7 bp, artificial
  LNA Oligomer
gtgatgt

SEQ ID NO: 3449 - DNA, 7 bp, artificial
  LNA Oligomer
agtctta

SEQ ID NO: 3450 - DNA, 7 bp, artificial
  LNA Oligomer
aaggatt

SEQ ID NO: 3451 - DNA, 7 bp, artificial
  LNA Oligomer
aggtgca

SEQ ID NO: 3452 - DNA, 7 bp, artificial
  LNA Oligomer
ggtgcat

SEQ ID NO: 3453 - DNA, 7 bp, artificial
  LNA Oligomer
aaaggat

SEQ ID NO: 3454 - DNA, 7 bp, artificial
  LNA Oligomer
ggtgcat

SEQ ID NO: 3455 - DNA, 7 bp, artificial
  LNA Oligomer
gcaagga

SEQ ID NO: 3456 - DNA, 7 bp, artificial
  LNA Oligomer
cgctgct

SEQ ID NO: 3457 - DNA, 7 bp, artificial
  LNA Oligomer
cagggtc

SEQ ID NO: 3458 - DNA, 7 bp, artificial
  LNA Oligomer
tgttgac

SEQ ID NO: 3459 - DNA, 7 bp, artificial
  LNA Oligomer
tggctcc

SEQ ID NO: 3460 - DNA, 7 bp, artificial
  LNA Oligomer
gtgcctt

SEQ ID NO: 3461 - DNA, 7 bp, artificial
  LNA Oligomer
gtgcaaa

SEQ ID NO: 3462 - DNA, 7 bp, artificial
  LNA Oligomer
tacaatc

SEQ ID NO: 3463 - DNA, 7 bp, artificial
  LNA Oligomer
ctggagt

SEQ ID NO: 3464 - DNA, 7 bp, artificial
  LNA Oligomer
ctgcagt

SEQ ID NO: 3465 - DNA, 7 bp, artificial
  LNA Oligomer
accaatc

SEQ ID NO: 3466 - DNA, 7 bp, artificial
  LNA Oligomer
ctgcagt

SEQ ID NO: 3467 - DNA, 7 bp, artificial
  LNA Oligomer
cctgagt

SEQ ID NO: 3468 - DNA, 7 bp, artificial
  LNA Oligomer
aaagaca

SEQ ID NO: 3469 - DNA, 7 bp, artificial
  LNA Oligomer
cagcact

SEQ ID NO: 3470 - DNA, 7 bp, artificial
  LNA Oligomer
gctgagt

SEQ ID NO: 3471 - DNA, 7 bp, artificial
  LNA Oligomer
gaaattt

SEQ ID NO: 3472 - DNA, 7 bp, artificial
  LNA Oligomer
cctgtga

SEQ ID NO: 3473 - DNA, 7 bp, artificial
  LNA Oligomer
cttgtga

SEQ ID NO: 3474 - DNA, 7 bp, artificial
  LNA Oligomer
cttgaga

SEQ ID NO: 3475 - DNA, 7 bp, artificial
  LNA Oligomer
gtgtcaa

SEQ ID NO: 3476 - DNA, 7 bp, artificial
  LNA Oligomer
aggcact

SEQ ID NO: 3477 - DNA, 7 bp, artificial
  LNA Oligomer
ttggaga

SEQ ID NO: 3478 - DNA, 7 bp, artificial
  LNA Oligomer
aggaagc

SEQ ID NO: 3479 - DNA, 7 bp, artificial
  LNA Oligomer
ctcgaga

SEQ ID NO: 3480 - DNA, 7 bp, artificial
  LNA Oligomer
ctccaga

SEQ ID NO: 3481 - DNA, 7 bp, artificial
  LNA Oligomer
tctagag

SEQ ID NO: 3482 - DNA, 7 bp, artificial
  LNA Oligomer
tgcacga

SEQ ID NO: 3483 - DNA, 7 bp, artificial
  LNA Oligomer
atgcacg

SEQ ID NO: 3484 - DNA, 7 bp, artificial
  LNA Oligomer
tgcacga

SEQ ID NO: 3485 - DNA, 7 bp, artificial
  LNA Oligomer
gcgcttt

SEQ ID NO: 3486 - DNA, 7 bp, artificial
  LNA Oligomer
gcgcttt

SEQ ID NO: 3487 - DNA, 7 bp, artificial
  LNA Oligomer
gcgcttt

SEQ ID NO: 3488 - DNA, 7 bp, artificial
  LNA Oligomer
tccagag

SEQ ID NO: 3489 - DNA, 7 bp, artificial
  LNA Oligomer
gcgcttt

SEQ ID NO: 3490 - DNA, 7 bp, artificial
  LNA Oligomer
ctctaga

SEQ ID NO: 3491 - DNA, 7 bp, artificial
  LNA Oligomer
agcgctt

SEQ ID NO: 3492 - DNA, 7 bp, artificial
  LNA Oligomer
gcgcttt

SEQ ID NO: 3493 - DNA, 7 bp, artificial
  LNA Oligomer
ctctaga

SEQ ID NO: 3494 - DNA, 7 bp, artificial
  LNA Oligomer
tgcactt

SEQ ID NO: 3495 - DNA, 7 bp, artificial
  LNA Oligomer
ctctaga

SEQ ID NO: 3496 - DNA, 7 bp, artificial
  LNA Oligomer
tgcactt

SEQ ID NO: 3497 - DNA, 7 bp, artificial
  LNA Oligomer
tgcactt

SEQ ID NO: 3498 - DNA, 7 bp, artificial
  LNA Oligomer
gcacttt

SEQ ID NO: 3499 - DNA, 7 bp, artificial
  LNA Oligomer
aggcact

SEQ ID NO: 3500 - DNA, 7 bp, artificial
  LNA Oligomer
ttggaga

SEQ ID NO: 3501 - DNA, 7 bp, artificial
  LNA Oligomer
agcactt

SEQ ID NO: 3502 - DNA, 7 bp, artificial
  LNA Oligomer
ctctgga

SEQ ID NO: 3503 - DNA, 7 bp, artificial
  LNA Oligomer
agcactt

SEQ ID NO: 3504 - DNA, 7 bp, artificial
  LNA Oligomer
agcactt

SEQ ID NO: 3505 - DNA, 7 bp, artificial
  LNA Oligomer
agcactt

SEQ ID NO: 3506 - DNA, 7 bp, artificial
  LNA Oligomer
ctttgta

SEQ ID NO: 3507 - DNA, 7 bp, artificial
  LNA Oligomer
agcactt

SEQ ID NO: 3508 - DNA, 7 bp, artificial
  LNA Oligomer
aagcact

SEQ ID NO: 3509 - DNA, 7 bp, artificial
  LNA Oligomer
cactttg

SEQ ID NO: 3510 - DNA, 7 bp, artificial
  LNA Oligomer
cactttg

SEQ ID NO: 3511 - DNA, 7 bp, artificial
  LNA Oligomer
agtgcgt

SEQ ID NO: 3512 - DNA, 7 bp, artificial
  LNA Oligomer
accattt

SEQ ID NO: 3513 - DNA, 7 bp, artificial
  LNA Oligomer
gcgcgtt

SEQ ID NO: 3514 - DNA, 7 bp, artificial
  LNA Oligomer
gcgcctt

SEQ ID NO: 3515 - DNA, 7 bp, artificial
  LNA Oligomer
ctttgta

SEQ ID NO: 3516 - DNA, 7 bp, artificial
  LNA Oligomer
gcgcctt

SEQ ID NO: 3517 - DNA, 7 bp, artificial
  LNA Oligomer
ctctgga

SEQ ID NO: 3518 - DNA, 7 bp, artificial
  LNA Oligomer
ctcaaga

SEQ ID NO: 3519 - DNA, 7 bp, artificial
  LNA Oligomer
gcacttt

SEQ ID NO: 3520 - DNA, 7 bp, artificial
  LNA Oligomer
ctttgca

SEQ ID NO: 3521 - DNA, 7 bp, artificial
  LNA Oligomer
gtgggag

SEQ ID NO: 3522 - DNA, 7 bp, artificial
  LNA Oligomer
aaggcat

SEQ ID NO: 3523 - DNA, 7 bp, artificial
  LNA Oligomer
atttctc

SEQ ID NO: 3524 - DNA, 7 bp, artificial
  LNA Oligomer
gcccacc

SEQ ID NO: 3525 - DNA, 7 bp, artificial
  LNA Oligomer
aatcctt

SEQ ID NO: 3526 - DNA, 7 bp, artificial
  LNA Oligomer
ctgtcac

SEQ ID NO: 3527 - DNA, 7 bp, artificial
  LNA Oligomer
atccccg

SEQ ID NO: 3528 - DNA, 7 bp, artificial
  LNA Oligomer
gaatgtt

SEQ ID NO: 3529 - DNA, 7 bp, artificial
  LNA Oligomer
tgcagaa

SEQ ID NO: 3530 - DNA, 7 bp, artificial
  LNA Oligomer
tttgctg

SEQ ID NO: 3531 - DNA, 7 bp, artificial
  LNA Oligomer
tttactg

SEQ ID NO: 3532 - DNA, 7 bp, artificial
  LNA Oligomer
cagtttt

SEQ ID NO: 3533 - DNA, 7 bp, artificial
  LNA Oligomer
ttacttt

SEQ ID NO: 3534 - DNA, 7 bp, artificial
  LNA Oligomer
ggttctt

SEQ ID NO: 3535 - DNA, 7 bp, artificial
  LNA Oligomer
ttacttt

SEQ ID NO: 3536 - DNA, 7 bp, artificial
  LNA Oligomer
gattttt

SEQ ID NO: 3537 - DNA, 7 bp, artificial
  LNA Oligomer
ttacttt

SEQ ID NO: 3538 - DNA, 7 bp, artificial
  LNA Oligomer
ggttttt

SEQ ID NO: 3539 - DNA, 7 bp, artificial
  LNA Oligomer
ttacttt

SEQ ID NO: 3540 - DNA, 7 bp, artificial
  LNA Oligomer
cagtttt

SEQ ID NO: 3541 - DNA, 7 bp, artificial
  LNA Oligomer
cagtttt

SEQ ID NO: 3542 - DNA, 7 bp, artificial
  LNA Oligomer
acagttt

SEQ ID NO: 3543 - DNA, 7 bp, artificial
  LNA Oligomer
ttacttt

SEQ ID NO: 3544 - DNA, 7 bp, artificial
  LNA Oligomer
ttacttt

SEQ ID NO: 3545 - DNA, 7 bp, artificial
  LNA Oligomer
ttacttt

SEQ ID NO: 3546 - DNA, 7 bp, artificial
  LNA Oligomer
gtacttt

SEQ ID NO: 3547 - DNA, 7 bp, artificial
  LNA Oligomer
atacttt

SEQ ID NO: 3548 - DNA, 7 bp, artificial
  LNA Oligomer
taccttt

SEQ ID NO: 3549 - DNA, 7 bp, artificial
  LNA Oligomer
tactttt

SEQ ID NO: 3550 - DNA, 7 bp, artificial
  LNA Oligomer
agttttg

SEQ ID NO: 3551 - DNA, 7 bp, artificial
  LNA Oligomer
ttttgct

SEQ ID NO: 3552 - DNA, 7 bp, artificial
  LNA Oligomer
agttgtc

SEQ ID NO: 3553 - DNA, 7 bp, artificial
  LNA Oligomer
caggcac

SEQ ID NO: 3554 - DNA, 7 bp, artificial
  LNA Oligomer
gtaagac

SEQ ID NO: 3555 - DNA, 7 bp, artificial
  LNA Oligomer
tgggtcg

SEQ ID NO: 3556 - DNA, 7 bp, artificial
  LNA Oligomer
tgggtcg

SEQ ID NO: 3557 - DNA, 7 bp, artificial
  LNA Oligomer
ttgattt

SEQ ID NO: 3558 - DNA, 7 bp, artificial
  LNA Oligomer
cacctgt

SEQ ID NO: 3559 - DNA, 7 bp, artificial
  LNA Oligomer
accgttt

SEQ ID NO: 3560 - DNA, 7 bp, artificial
  LNA Oligomer
ggactag

SEQ ID NO: 3561 - DNA, 7 bp, artificial
  LNA Oligomer
cttaccc

SEQ ID NO: 3562 - DNA, 7 bp, artificial
  LNA Oligomer
ggtaata

SEQ ID NO: 3563 - DNA, 7 bp, artificial
  LNA Oligomer
agctcat

SEQ ID NO: 3564 - DNA, 7 bp, artificial
  LNA Oligomer
gtgcaaa

SEQ ID NO: 3565 - DNA, 7 bp, artificial
  LNA Oligomer
gcagctc

SEQ ID NO: 3566 - DNA, 7 bp, artificial
  LNA Oligomer
ttacttt

SEQ ID NO: 3567 - DNA, 7 bp, artificial
  LNA Oligomer
aaacttt

SEQ ID NO: 3568 - DNA, 7 bp, artificial
  LNA Oligomer
gctactt

SEQ ID NO: 3569 - DNA, 7 bp, artificial
  LNA Oligomer
gtcaacc

SEQ ID NO: 3570 - DNA, 7 bp, artificial
  LNA Oligomer
ccgtgcc

SEQ ID NO: 3571 - DNA, 7 bp, artificial
  LNA Oligomer
aggcgcc

SEQ ID NO: 3572 - DNA, 7 bp, artificial
  LNA Oligomer
aacatac

SEQ ID NO: 3573 - DNA, 7 bp, artificial
  LNA Oligomer
ttataca

SEQ ID NO: 3574 - DNA, 7 bp, artificial
  LNA Oligomer
cattaac

SEQ ID NO: 3575 - DNA, 7 bp, artificial
  LNA Oligomer
tgttttc

SEQ ID NO: 3576 - DNA, 7 bp, artificial
  LNA Oligomer
ccaactc

SEQ ID NO: 3577 - DNA, 7 bp, artificial
  LNA Oligomer
gagcgga

SEQ ID NO: 3578 - DNA, 7 bp, artificial
  LNA Oligomer
cacttca

SEQ ID NO: 3579 - DNA, 7 bp, artificial
  LNA Oligomer
tgagcgt

SEQ ID NO: 3580 - DNA, 7 bp, artificial
  LNA Oligomer
cacactc

SEQ ID NO: 3581 - DNA, 7 bp, artificial
  LNA Oligomer
actggct

SEQ ID NO: 3582 - DNA, 7 bp, artificial
  LNA Oligomer
cacatct

SEQ ID NO: 3583 - DNA, 7 bp, artificial
  LNA Oligomer
attagaa

SEQ ID NO: 3584 - DNA, 7 bp, artificial
  LNA Oligomer
tttatct

SEQ ID NO: 3585 - DNA, 7 bp, artificial
  LNA Oligomer
acaagaa

SEQ ID NO: 3586 - DNA, 7 bp, artificial
  LNA Oligomer
caaatga

SEQ ID NO: 3587 - DNA, 7 bp, artificial
  LNA Oligomer
attctca

SEQ ID NO: 3588 - DNA, 7 bp, artificial
  LNA Oligomer
acacaag

SEQ ID NO: 3589 - DNA, 7 bp, artificial
  LNA Oligomer
accagtt

SEQ ID NO: 3590 - DNA, 7 bp, artificial
  LNA Oligomer
aactgta

SEQ ID NO: 3591 - DNA, 7 bp, artificial
  LNA Oligomer
cctcttt

SEQ ID NO: 3592 - DNA, 7 bp, artificial
  LNA Oligomer
aaccata

SEQ ID NO: 3593 - DNA, 7 bp, artificial
  LNA Oligomer
tacgccc

SEQ ID NO: 3594 - DNA, 7 bp, artificial
  LNA Oligomer
aatgcat

SEQ ID NO: 3595 - DNA, 7 bp, artificial
  LNA Oligomer
tatggaa

SEQ ID NO: 3596 - DNA, 7 bp, artificial
  LNA Oligomer
gtggcca

SEQ ID NO: 3597 - DNA, 7 bp, artificial
  LNA Oligomer
ggttctc

SEQ ID NO: 3598 - DNA, 7 bp, artificial
  LNA Oligomer
tgttctg

SEQ ID NO: 3599 - DNA, 7 bp, artificial
  LNA Oligomer
taaaatt

SEQ ID NO: 3600 - DNA, 7 bp, artificial
  LNA Oligomer
ataagct

SEQ ID NO: 3601 - DNA, 7 bp, artificial
  LNA Oligomer
catggtc

SEQ ID NO: 3602 - DNA, 7 bp, artificial
  LNA Oligomer
tgacaca

SEQ ID NO: 3603 - DNA, 7 bp, artificial
  LNA Oligomer
cagagac

SEQ ID NO: 3604 - DNA, 7 bp, artificial
  LNA Oligomer
tggtgcc

SEQ ID NO: 3605 - DNA, 7 bp, artificial
  LNA Oligomer
cacactt

SEQ ID NO: 3606 - DNA, 7 bp, artificial
  LNA Oligomer
gcaggct

SEQ ID NO: 3607 - DNA, 7 bp, artificial
  LNA Oligomer
gtgacac

SEQ ID NO: 3608 - DNA, 7 bp, artificial
  LNA Oligomer
atgacgt

SEQ ID NO: 3609 - DNA, 7 bp, artificial
  LNA Oligomer
gacacaa

SEQ ID NO: 3610 - DNA, 7 bp, artificial
  LNA Oligomer
ctgtaag

SEQ ID NO: 3611 - DNA, 7 bp, artificial
  LNA Oligomer
ctagacc

SEQ ID NO: 3612 - DNA, 7 bp, artificial
  LNA Oligomer
cccgtgt

SEQ ID NO: 3613 - DNA, 7 bp, artificial
  LNA Oligomer
agtgtgt

SEQ ID NO: 3614 - DNA, 7 bp, artificial
  LNA Oligomer
cgcagcc

SEQ ID NO: 3615 - DNA, 7 bp, artificial
  LNA Oligomer
gggattt

SEQ ID NO: 3616 - DNA, 7 bp, artificial
  LNA Oligomer
agtagtt

SEQ ID NO: 3617 - DNA, 7 bp, artificial
  LNA Oligomer
atttgaa

SEQ ID NO: 3618 - DNA, 7 bp, artificial
  LNA Oligomer
ccacccc

SEQ ID NO: 3619 - DNA, 7 bp, artificial
  LNA Oligomer
aacaccc

SEQ ID NO: 3620 - DNA, 7 bp, artificial
  LNA Oligomer
ttagctc

SEQ ID NO: 3621 - DNA, 7 bp, artificial
  LNA Oligomer
gtcctcg

SEQ ID NO: 3622 - DNA, 7 bp, artificial
  LNA Oligomer
tgcccag

SEQ ID NO: 3623 - DNA, 7 bp, artificial
  LNA Oligomer
acattcc

SEQ ID NO: 3624 - DNA, 7 bp, artificial
  LNA Oligomer
aggcgtt

SEQ ID NO: 3625 - DNA, 7 bp, artificial
  LNA Oligomer
ggctcgg

SEQ ID NO: 3626 - DNA, 7 bp, artificial
  LNA Oligomer
ggacccc

SEQ ID NO: 3627 - DNA, 7 bp, artificial
  LNA Oligomer
caatgac

SEQ ID NO: 3628 - DNA, 7 bp, artificial
  LNA Oligomer
ttttgag

SEQ ID NO: 3629 - DNA, 7 bp, artificial
  LNA Oligomer
ggaagtc

SEQ ID NO: 3630 - DNA, 7 bp, artificial
  LNA Oligomer
tagagtt

SEQ ID NO: 3631 - DNA, 7 bp, artificial
  LNA Oligomer
tccaggt

SEQ ID NO: 3632 - DNA, 7 bp, artificial
  LNA Oligomer
atctcca

SEQ ID NO: 3633 - DNA, 7 bp, artificial
  LNA Oligomer
tgctagc

SEQ ID NO: 3634 - DNA, 7 bp, artificial
  LNA Oligomer
cagactg

SEQ ID NO: 3635 - DNA, 7 bp, artificial
  LNA Oligomer
caaggga

SEQ ID NO: 3636 - DNA, 7 bp, artificial
  LNA Oligomer
accttgt

SEQ ID NO: 3637 - DNA, 7 bp, artificial
  LNA Oligomer
tggtact

SEQ ID NO: 3638 - DNA, 7 bp, artificial
  LNA Oligomer
ttccccc

SEQ ID NO: 3639 - DNA, 7 bp, artificial
  LNA Oligomer
ctatagt

SEQ ID NO: 3640 - DNA, 7 bp, artificial
  LNA Oligomer
agacagc

SEQ ID NO: 3641 - DNA, 7 bp, artificial
  LNA Oligomer
agactca

SEQ ID NO: 3642 - DNA, 7 bp, artificial
  LNA Oligomer
ttactag

SEQ ID NO: 3643 - DNA, 7 bp, artificial
  LNA Oligomer
gtcagca

SEQ ID NO: 3644 - DNA, 7 bp, artificial
  LNA Oligomer
taaaccc

SEQ ID NO: 3645 - DNA, 7 bp, artificial
  LNA Oligomer
gggagaa

SEQ ID NO: 3646 - DNA, 7 bp, artificial
  LNA Oligomer
agaatac

SEQ ID NO: 3647 - DNA, 7 bp, artificial
  LNA Oligomer
ccaggtc

SEQ ID NO: 3648 - DNA, 7 bp, artificial
  LNA Oligomer
gcagaca

SEQ ID NO: 3649 - DNA, 7 bp, artificial
  LNA Oligomer
actatta

SEQ ID NO: 3650 - DNA, 7 bp, artificial
  LNA Oligomer
tgctggt

SEQ ID NO: 3651 - DNA, 7 bp, artificial
  LNA Oligomer
gcccaag

SEQ ID NO: 3652 - DNA, 7 bp, artificial
  LNA Oligomer
caagcac

SEQ ID NO: 3653 - DNA, 7 bp, artificial
  LNA Oligomer
cccccag

SEQ ID NO: 3654 - DNA, 7 bp, artificial
  LNA Oligomer
cgatccc

SEQ ID NO: 3655 - DNA, 7 bp, artificial
  LNA Oligomer
gcagcga

SEQ ID NO: 3656 - DNA, 7 bp, artificial
  LNA Oligomer
tggatca

SEQ ID NO: 3657 - DNA, 7 bp, artificial
  LNA Oligomer
atgtctt

SEQ ID NO: 3658 - DNA, 7 bp, artificial
  LNA Oligomer
agaggga

SEQ ID NO: 3659 - DNA, 7 bp, artificial
  LNA Oligomer
atacaag

SEQ ID NO: 3660 - DNA, 7 bp, artificial
  LNA Oligomer
gccacac

SEQ ID NO: 3661 - DNA, 7 bp, artificial
  LNA Oligomer
agcctag

SEQ ID NO: 3662 - DNA, 7 bp, artificial
  LNA Oligomer
agctgct

SEQ ID NO: 3663 - DNA, 7 bp, artificial
  LNA Oligomer
gcagcca

SEQ ID NO: 3664 - DNA, 7 bp, artificial
  LNA Oligomer
gcacact

SEQ ID NO: 3665 - DNA, 7 bp, artificial
  LNA Oligomer
acaggtt

SEQ ID NO: 3666 - DNA, 7 bp, artificial
  LNA Oligomer
tgcctcc

SEQ ID NO: 3667 - DNA, 7 bp, artificial
  LNA Oligomer
atcctaa

SEQ ID NO: 3668 - DNA, 7 bp, artificial
  LNA Oligomer
gcgccat

SEQ ID NO: 3669 - DNA, 7 bp, artificial
  LNA Oligomer
ttcaaca

SEQ ID NO: 3670 - DNA, 7 bp, artificial
  LNA Oligomer
cagacat

SEQ ID NO: 3671 - DNA, 7 bp, artificial
  LNA Oligomer
gcccacc

SEQ ID NO: 3672 - DNA, 7 bp, artificial
  LNA Oligomer
tgtatta

SEQ ID NO: 3673 - DNA, 7 bp, artificial
  LNA Oligomer
ataatat

SEQ ID NO: 3674 - DNA, 7 bp, artificial
  LNA Oligomer
aacctgc

SEQ ID NO: 3675 - DNA, 7 bp, artificial
  LNA Oligomer
cctccgc

SEQ ID NO: 3676 - DNA, 7 bp, artificial
  LNA Oligomer
gaaccaa

SEQ ID NO: 3677 - DNA, 7 bp, artificial
  LNA Oligomer
aatgggt

SEQ ID NO: 3678 - DNA, 7 bp, artificial
  LNA Oligomer
cccaggc

SEQ ID NO: 3679 - DNA, 7 bp, artificial
  LNA Oligomer
acgtggg

SEQ ID NO: 3680 - DNA, 7 bp, artificial
  LNA Oligomer
ccccgcc

SEQ ID NO: 3681 - DNA, 7 bp, artificial
  LNA Oligomer
gggccac

SEQ ID NO: 3682 - DNA, 7 bp, artificial
  LNA Oligomer
aatgaat

SEQ ID NO: 3683 - DNA, 7 bp, artificial
  LNA Oligomer
tagccag

SEQ ID NO: 3684 - DNA, 7 bp, artificial
  LNA Oligomer
ctcctgg

SEQ ID NO: 3685 - DNA, 7 bp, artificial
  LNA Oligomer
gagtgac

SEQ ID NO: 3686 - DNA, 7 bp, artificial
  LNA Oligomer
gaaccgg

SEQ ID NO: 3687 - DNA, 7 bp, artificial
  LNA Oligomer
ggcttcc

SEQ ID NO: 3688 - DNA, 7 bp, artificial
  LNA Oligomer
ccgcacc

SEQ ID NO: 3689 - DNA, 7 bp, artificial
  LNA Oligomer
gcataca

SEQ ID NO: 3690 - DNA, 7 bp, artificial
  LNA Oligomer
gtcttcc

SEQ ID NO: 3691 - DNA, 7 bp, artificial
  LNA Oligomer
atttgtt

SEQ ID NO: 3692 - DNA, 7 bp, artificial
  LNA Oligomer
atttgtt

SEQ ID NO: 3693 - DNA, 7 bp, artificial
  LNA Oligomer
agctcct

SEQ ID NO: 3694 - DNA, 7 bp, artificial
  LNA Oligomer
tctagtt

SEQ ID NO: 3695 - DNA, 7 bp, artificial
  LNA Oligomer
cagcgag

SEQ ID NO: 3696 - DNA, 7 bp, artificial
  LNA Oligomer
gccccgc

SEQ ID NO: 3697 - DNA, 7 bp, artificial
  LNA Oligomer
ggcaaca

SEQ ID NO: 3698 - DNA, 7 bp, artificial
  LNA Oligomer
gtcacaa

SEQ ID NO: 3699 - DNA, 7 bp, artificial
  LNA Oligomer
cagagcc

SEQ ID NO: 3700 - DNA, 7 bp, artificial
  LNA Oligomer
ctcctcc

SEQ ID NO: 3701 - DNA, 7 bp, artificial
  LNA Oligomer
gctggag

SEQ ID NO: 3702 - DNA, 7 bp, artificial
  LNA Oligomer
tgagcag

SEQ ID NO: 3703 - DNA, 7 bp, artificial
  LNA Oligomer
atggtgc

SEQ ID NO: 3704 - DNA, 7 bp, artificial
  LNA Oligomer
gatccca

SEQ ID NO: 3705 - DNA, 7 bp, artificial
  LNA Oligomer
aggtctc

SEQ ID NO: 3706 - DNA, 7 bp, artificial
  LNA Oligomer
gtactgg

SEQ ID NO: 3707 - DNA, 7 bp, artificial
  LNA Oligomer
tgttact

SEQ ID NO: 3708 - DNA, 7 bp, artificial
  LNA Oligomer
gttcctg

SEQ ID NO: 3709 - DNA, 7 bp, artificial
  LNA Oligomer
cagggca

SEQ ID NO: 3710 - DNA, 7 bp, artificial
  LNA Oligomer
tttccag

SEQ ID NO: 3711 - DNA, 7 bp, artificial
  LNA Oligomer
gaggtat

SEQ ID NO: 3712 - DNA, 7 bp, artificial
  LNA Oligomer
aaccacc

SEQ ID NO: 3713 - DNA, 7 bp, artificial
  LNA Oligomer
gaaatcc

SEQ ID NO: 3714 - DNA, 7 bp, artificial
  LNA Oligomer
tcctcta

SEQ ID NO: 3715 - DNA, 7 bp, artificial
  LNA Oligomer
gaagagg

SEQ ID NO: 3716 - DNA, 7 bp, artificial
  LNA Oligomer
cgctgcc

SEQ ID NO: 3717 - DNA, 7 bp, artificial
  LNA Oligomer
gtaatgg

SEQ ID NO: 3718 - DNA, 7 bp, artificial
  LNA Oligomer
cacccgc

SEQ ID NO: 3719 - DNA, 7 bp, artificial
  LNA Oligomer
ccgaccc

SEQ ID NO: 3720 - DNA, 7 bp, artificial
  LNA Oligomer
ccgttca

SEQ ID NO: 3721 - DNA, 7 bp, artificial
  LNA Oligomer
tttgagt

SEQ ID NO: 3722 - DNA, 7 bp, artificial
  LNA Oligomer
tgtcagt

SEQ ID NO: 3723 - DNA, 7 bp, artificial
  LNA Oligomer
gatatta

SEQ ID NO: 3724 - DNA, 7 bp, artificial
  LNA Oligomer
tccaagt

SEQ ID NO: 3725 - DNA, 7 bp, artificial
  LNA Oligomer
tcgttgc

SEQ ID NO: 3726 - DNA, 7 bp, artificial
  LNA Oligomer
aagttgc

SEQ ID NO: 3727 - DNA, 7 bp, artificial
  LNA Oligomer
acacagt

SEQ ID NO: 3728 - DNA, 7 bp, artificial
  LNA Oligomer
agccagt

SEQ ID NO: 3729 - DNA, 7 bp, artificial
  LNA Oligomer
accaaag

SEQ ID NO: 3730 - DNA, 7 bp, artificial
  LNA Oligomer
agcttta

SEQ ID NO: 3731 - DNA, 7 bp, artificial
  LNA Oligomer
agctccc

SEQ ID NO: 3732 - DNA, 7 bp, artificial
  LNA Oligomer
ctcacta

SEQ ID NO: 3733 - DNA, 7 bp, artificial
  LNA Oligomer
tctgctg

SEQ ID NO: 3734 - DNA, 7 bp, artificial
  LNA Oligomer
ccgctga

SEQ ID NO: 3735 - DNA, 7 bp, artificial
  LNA Oligomer
aagactc

SEQ ID NO: 3736 - DNA, 7 bp, artificial
  LNA Oligomer
gtgcaat

SEQ ID NO: 3737 - DNA, 7 bp, artificial
  LNA Oligomer
cccaacc

SEQ ID NO: 3738 - DNA, 7 bp, artificial
  LNA Oligomer
ccccacc

SEQ ID NO: 3739 - DNA, 7 bp, artificial
  LNA Oligomer
gtgcaat

SEQ ID NO: 3740 - DNA, 7 bp, artificial
  LNA Oligomer
ccgtccc

SEQ ID NO: 3741 - DNA, 7 bp, artificial
  LNA Oligomer
gcacttt

SEQ ID NO: 3742 - DNA, 7 bp, artificial
  LNA Oligomer
tcagcag

SEQ ID NO: 3743 - DNA, 7 bp, artificial
  LNA Oligomer
tgcgcac

SEQ ID NO: 3744 - DNA, 7 bp, artificial
  LNA Oligomer
agtagac

SEQ ID NO: 3745 - DNA, 7 bp, artificial
  LNA Oligomer
gtaactg

SEQ ID NO: 3746 - DNA, 7 bp, artificial
  LNA Oligomer
tctactg

SEQ ID NO: 3747 - DNA, 7 bp, artificial
  LNA Oligomer
gcgcgga

SEQ ID NO: 3748 - DNA, 7 bp, artificial
  LNA Oligomer
taagggc

SEQ ID NO: 3749 - DNA, 7 bp, artificial
  LNA Oligomer
gctcccc

SEQ ID NO: 3750 - DNA, 7 bp, artificial
  LNA Oligomer
cctgcct

SEQ ID NO: 3751 - DNA, 7 bp, artificial
  LNA Oligomer
gccgggt

SEQ ID NO: 3752 - DNA, 7 bp, artificial
  LNA Oligomer
agagaag

SEQ ID NO: 3753 - DNA, 7 bp, artificial
  LNA Oligomer
acagtca

SEQ ID NO: 3754 - DNA, 7 bp, artificial
  LNA Oligomer
aataatt

SEQ ID NO: 3755 - DNA, 7 bp, artificial
  LNA Oligomer
ccgttga

SEQ ID NO: 3756 - DNA, 7 bp, artificial
  LNA Oligomer
gtgccaa

SEQ ID NO: 3757 - DNA, 7 bp, artificial
  LNA Oligomer
acatgat

SEQ ID NO: 3758 - DNA, 7 bp, artificial
  LNA Oligomer
ctacctc

SEQ ID NO: 3759 - DNA, 7 bp, artificial
  LNA Oligomer
tacgggt

SEQ ID NO: 3760 - DNA, 7 bp, artificial
  LNA Oligomer
cgagctt

SEQ ID NO: 3761 - DNA, 7 bp, artificial
  LNA Oligomer
tacgggt

SEQ ID NO: 3762 - DNA, 7 bp, artificial
  LNA Oligomer
cgagctt

SEQ ID NO: 3763 - DNA, 7 bp, artificial
  LNA Oligomer
tccttcc

SEQ ID NO: 3764 - DNA, 7 bp, artificial
  LNA Oligomer
ggctcag

SEQ ID NO: 3765 - DNA, 7 bp, artificial
  LNA Oligomer
gcgtgcg

SEQ ID NO: 3766 - DNA, 7 bp, artificial
  LNA Oligomer
agtccca

SEQ ID NO: 3767 - DNA, 7 bp, artificial
  LNA Oligomer
caggcaa

SEQ ID NO: 3768 - DNA, 7 bp, artificial
  LNA Oligomer
actctac

SEQ ID NO: 3769 - DNA, 7 bp, artificial
  LNA Oligomer
tctctga

SEQ ID NO: 3770 - DNA, 7 bp, artificial
  LNA Oligomer
gggaagt

SEQ ID NO: 3771 - DNA, 7 bp, artificial
  LNA Oligomer
cctgtaa

SEQ ID NO: 3772 - DNA, 7 bp, artificial
  LNA Oligomer
caacact

SEQ ID NO: 3773 - DNA, 7 bp, artificial
  LNA Oligomer
caacacc

SEQ ID NO: 3774 - DNA, 7 bp, artificial
  LNA Oligomer
agcatta

SEQ ID NO: 3775 - DNA, 7 bp, artificial
  LNA Oligomer
ggcctgg

SEQ ID NO: 3776 - DNA, 7 bp, artificial
  LNA Oligomer
ctacagt

SEQ ID NO: 3777 - DNA, 7 bp, artificial
  LNA Oligomer
gaatgtg

SEQ ID NO: 3778 - DNA, 7 bp, artificial
  LNA Oligomer
gaccgcg

SEQ ID NO: 3779 - DNA, 7 bp, artificial
  LNA Oligomer
gtattct

SEQ ID NO: 3780 - DNA, 7 bp, artificial
  LNA Oligomer
gtttagc

SEQ ID NO: 3781 - DNA, 7 bp, artificial
  LNA Oligomer
gcatcct

SEQ ID NO: 3782 - DNA, 7 bp, artificial
  LNA Oligomer
aaccatc

SEQ ID NO: 3783 - DNA, 7 bp, artificial
  LNA Oligomer
gctgctg

SEQ ID NO: 3784 - DNA, 7 bp, artificial
  LNA Oligomer
tgggatc

SEQ ID NO: 3785 - DNA, 7 bp, artificial
  LNA Oligomer
cgcgcct

SEQ ID NO: 3786 - DNA, 7 bp, artificial
  LNA Oligomer
ataccca

SEQ ID NO: 3787 - DNA, 7 bp, artificial
  LNA Oligomer
agctggg
